United States Patent Application Publication US 2025/0320452 A1 - sequence listing, part 2

SEQ ID NO: 3 - DNA, 3979104 bp, synthetic construct (residues 1,989,553-3,979,104 of 3,979,104)
  source 1..3979104: mol_type = other DNA; note = Synthetic E.coli genome
gccatacccgcgggaatgaaattctctttattcctgcgctgtttattctgtttagtcttggcggcgcggtatttggtatgggagaagaggccgtcgcctttgccattatcatcgcaccgctaatggtccggctgggctatgacagtattaccaccgtcctggtgacctatattgccacgcaaatcggttttgccagtagctggatgaacccgttttgtgtggtcgttgctcaggggattgccggcgttccggtgctttctggctccgggttgcgcatcgtggtgtgggttatcgccactctgattggcctgatctttaccatggtgtacgccagtcgagtgaaaaagaatcctcttctgagtcgcgtgcatgagtccgaccgcttctttcgtgaaaagcaggctgatgttgaacaacgtccgtttacctttggtgactggctggtattgattgtcctgaccgccgtaatggtctgggtgatttggggcgtgatcgttaatgcctggtttattccagaaattgccagccagttcttcaccatgggtctggtgattggcatcatcggcgttgttttccgccttaacggcatgacggttaataccatggctagttcctttaccgaaggggcgcgaatgatgatcgcccctgccctgctggtgggtttcgccaaagggattttgctgctggtcggtaatggtgaagcgggtgatgccagcgtgttaaataccatcctcaacagcattgccaatgccattagcggtctggacaacgcggtcgcggcctggtttatgttgctcttccaggcggtatttaatttcttcgtgacgtccggttctggtcaggcggcgttaaccatgccgttactggcaccgcttggcgatctggtcggtgttaaccgtcaggttaccgtgctggcgttccagtttggtgatggcttcagtcacatcatttacccaaccagtgcgagcttaatggcaacgctcggtgtgtgcagggtggacttccgtaactggctgaaggtgggcgcgaccctacttggactgctgtttattatgtccagcgtcgtagtgatcggcgctcagttgatgggctaccactaaaaatgttaagagccgcaattgcggctcttttttcattctgccgtttcagtctctacggcttcatttttggcattgcgcttcatccacaacgctagcgctttcaggctgtctggagtgaactcatcgcagcgtgcggtgatttcttccggcgtcagccagcaaacttcactgacttcatcttcctgtagtgcgaagggaccgtgagagacgcagctgaacaatgcgccccagacacggcaatttttatcttcgaaatagaactgcccgtgctcggcaaaggggacaccggcaatgcccaactcttcttccgcttcgcgacgcgcggattccagcagttgctcatcggcctggactacaccgcctgcggtcgcatctaacatgccgggtaaaaagtcttttgtctcggtacgacgctggaccagaattttgcccatgccatcatgcacgacgatgtaagttgcacgatgacgcagacactgtgcccgcatttgttcccggctggcttgtgcaatgacttcgttctcttcattgacaatatccacccattcagtacttgccaaacgacgctgttccattatcaggaaaccttctttttctggcgctcttacggcgcattttgagttgtgggtaaattacggattaatcgcgacctgcgcaatgatactttgatcattgagtgcgattacactaagtacgtcattatccagcatgccataactcgccggattaccgcctttcggaatactcacgctgccggggttgaagtggaaaatctccccccgctgttctgccactggcagatgggtatgaccgtacaccagcacatcgttctggtttaaagcaggcagattttccgggccaaaaagatgaccatgcgtcaaaaacagacgttgtttttccagtaatacctgttgccacggcgcggttatcgggaaatgcagcagcatttgatccacttcgctgtcgcagttgccgcgcacagcgataaccttatgtgccacttcattaagccgttcagcgactttggctggcgcgtaaccctccggtaaagcattacgcgggccgtgattcaacacgtcgccaaggatcaccagccactgggcaccgctttgggcaaacaactccagaacacgttccgtcgccggtaagctcccatgaatgtcgcttgcaaacatcagtttcatcactcactcctcgtcgaaaaaacgtaagctatgatactggattctgtcgttgctatcagccagattgcttcgcgctaagtgcaataaaacgctggacagacgctcgctgccactggaatgttgcataatccaccaggcgttctggcacctcatcgccatgtagtaccaggcggttaatcattagcgccagatcagtatcagcaatgcaccattcaccaaataaattcggctgacccagtactaacaaatgttctgccatcgcgaacagtttctctgcactggcttttccctcggccgttagtggcgcttttttcgcccccgcaaagacaacatccgtcggacgctcttcgcggatgggcatcagatcgctgcgcagccaggcctgaatctgtcgtgcacgcgcacgattttctaaatcaagcggataaatacgttcccaggtcggtggcgcaaatcgatcttccagatactccgcaatggcagaagattcactcaactcaaaatcatcgatttgtaataacggcacacggcgtgtctgaccgtaaccttgccacgtcggctgcaaatgttcaccgctgtcgaggtcgatggtcttgatatgaaagctcaggcctttttcctgcaacgccacccaggcggataacacataaggggagaaaaagtgggcatcactccaaagcgtgatagcgggtttactcattatgtcctcggcaataaagggggctggctatcaaactatagagcctttttgtcactgtcacgtgacgaatactcacgtaagtcgccgcgctttctatacttgtggtgttcagatgattaaacaaccggagctgcaatgatcgatctctatttcgccccgacacccaatggtcacaaaattacgctgtttctcgaagaagcagagctggattatcgcttgattaaggtagacctggggaaaggcggtcagtttcgtccggaatttttgcgcattagccccaacaacaaaattccggcaattgttgatcattctcctgccgatggcggcgaaccgctaagcctctttgagtctggtgccattttgttgtatctggctgagaaaacaggactctttttgagtcatgaaacgcgtgagcgcgccgccacattacagtggttattctggcaggtaggcggactggggccgatgcttgggcaaaatcatcattttaatcacgcagccccccaaaccattccttacgctattgaacgttatcaggttgaaactcagcgtctttaccatgtactgaacaagcggctggaaaacagcccctggctgggaggcgagaactacagcattgcggatattgcctgctggccgtgggttaatgcctggactcgccagcgaattgacctagcaatgtatccggcagtcaagaactggcatgagcggatccgtagccgccctgccaccgggcaggcactgctaaaagcacaactcggtgatgagcgtagcgatagttaacagaaacaggttctcgtgtattatttcatcctaagtaaaacaacggagaacctgcaatggcacaacctgccgctattattcgtataaagaaccttcgtttgcgtacgtttatcggaattaaggaagaagaaattaacaaccgtcaggatattgttatcaatgtgacgatccactaccccgccgataaagcgcgcactagcgaagatatcaacgatgcgctgaattatcgcaccgtaacgaaaaacattattcagcatgtagagaataaccgtttctctttgctggaaaaattaactcaggatgtgctcgatatcgcacgtgaacatcactgggtgacgtatgctgaagtggagatcgataaactgcacgcgctgcgctacgccgatagcgtatccatgaccttaagctggcagcgttaatcgccatatcgggaggctgcatgaacatagtgatcaccggagggacaggattaattggtcgccatttgattccgcgtttgctggagctgggccatcaaattacggtagtgacgcgtaacccgcagaaagccagttccgttctcggccctcgggtgacactatggcaagggcttgccgatcaaagcaacctcaacggcgttgatgcggtaatcaacctggccggagaaccgattgctgataaacgctggactcacgagcaaaaagagcgtctctgccaaagccgctggaatatcacgcaaaaactggtcgatttgattaatgccagcgacacgccaccgagcgtactcatttccggcagcgcaacgggctattatggtgacttaggtgaagtggtggttaccgaagaggaaccgccgcataacgaatttacccataaactctgcgctcgctgggaagaaattgcctgccgggcgcaaagtgacaaaacgcgagtgtgcctgctgcgtaccggtgtagtgctggcaccggatggcggtattctcggtaaaatgctgccgccgtttcgtcttggcctgggcgggccgattggctctggtcggcagtatctggcctggattcatattgatgatatggtcaacggtattctctggctgctggataacgagctgcgcgggccatttaatatggttagcccctacccggtacgcaatgaacaatttgcccatgcgctcggtcatgcgctgcatcgcccggccattttgcgcgtccccgcgaccgccattcgactgttaatgggcgaatctagtgtactggtattaggtggacaacgcgcgctgcctaaacggctggaagaagcgggttttgcgtttcgctggtacgatttagaagaggcgctggcggatgtcgttcgctgatgtggtttacagcaaacatccgccagttaactcccggtgttacaggattagtggctttgcgcgataagatcgtctggactaagtcgggtcaccatcataactaactctctgtctaaacctctatccagcatctcctgagcaatacgcagggcttcttcgtgtttgccctgcattgcgccttcttcacgtaatctgtcagcaatggtcatcagtttctccttttcttgtggtgcgcgttccgctatctcaccaataaatgcacgaaaacgctgggcatcccctgtttgtaatacgtaattaaacagggcttttagctgtctgtcattagtgttccctgtaactagcaggctaacaatttggtcgactaatcccaacagatcgcgctgacgaatatgtttctgaattaactccaacagcgccattttgcggtgttgcataatctcgtcatccggcaccacggtaatatccaccaacggaaaagcgctactatatattttgcgggctatagcaggctcggcaaattcatcaagccagcagagactataaggataaggacttctgcaaccatgataaaacagcatcgggagcaccaatggaagctctttatagcccgcatcaagatggttttgcattgccgcaatggaataacgcatcatgcgaaaagccattaattcttccggcttactttggtgctctatcactacataaatataacccactccctcctgcgttttcacagaccacaagaggtcggaataatattgccgcaggtcttcatcaataaaactgtttggttccagtttaagcgtcgttaaatcacacagtttgcgcagcggcgcgggaagatgaatatcaataaaatcccgcgcggtgtctggatggcgtaaaaaagatttaaataccgcatcatgcggcgtggaagttgtgcttattgtcatggcgttccgtcacccctcaaatttaagatgacgcgacaataaccacgattaacacccaatgcagcaggcagtttttatctttggacagcgaattcagaagtatttttagcggactgtaacttttacatttcagcggaagctgactcgcaaattccccatgaaaatactccggcagcgttagccaccggagaggaaattatttcaggcttcccttaaggaaccgttgcagacgagggctttgcgggttgccaaataactgctccggcgcgccctcttcttctattttcccctgatggaggaaaatgacatgagtagaaacatggcgagcaaagcccatttcgtgagtcactaccaccatggttttcccctcttctgccagttgctgcataatacgcaacacttcgcctaccagttcaggatcgagcgcgctggtaggttcatcaaacagtaaaacttccggttccatcgccagcgcccgcgcgatagaaacacgctgttgctgaccgccggaaagatgcaccggatatttcccctgcgcacgttcgtctatcccgacttttgccagatacttcaccgcccgctcgcgcgcttcctgcttgctcaggcccaacacctgaatcggcgcttccatgacgttttccagcaccgtcatatggctccagagattgaagtgctggaataccatcgtcaggcgtgtgcgcagtaagcgcagttgatttttatcggcgactttgagttgaccgtctttgtcgcgcaccagattgatcgtctggccattgaccacgatgctcccttcactcggtttttcgaggaagttaatgcagcgcagaaaggtacttttcccgcttccgctgcttccgatgatgcttattacatctccggcattcgcttgcagacttacccctttcagcacttcatgttcgccgtagcgtttgtgcaaatcgataacgtttaatttattctcggacatcgtattctcagtgcgtactagaaggtttcacatgctgcaaccagcgtttttccgctctgcgaaagaggctgatcaggacataagagatgattaaatagagcaccgcggcaatgccgaaggcggtaaaaggttgatacgtggcggcgttaatatcgcgggctattttcagcagatccggcaccgtggcagtaaatgccaacgcagtagagtgcagcatcaggatcacttcgttgctgtatgccggtaacgcaatacgcagcgcagaaggcaaaataatgcagcgatacattttaaaagtgctgaagccataggctctggcggcttcaatttccccatgcggaacgctacggattgccccagcaaaaatctcggtagtgtaagcgcaggtgttaagcgtcagcgccagcacggtacagttcaggccactgcggaagaaagcgttaaggaattcggttcccttaacaatctcaagcgtgtacatgccggaatagaacaccagcaactgaacatacagcggcgtaccgcgaaaaatataggtaaataaccagattggaaactggatgtatttattactggagacacgaccaatcgccagaaacagcgccaggactccgcctatcactacgctcaaaataagcagccacagagtgatcgccacaccagtaaagcgataaccgtcggtccacagcagcggtttccagtattcatgtaagatttcgatcacaggtcagccctcttcacacccacggagtagcggcgctcaaggaacagcagcacaccattggaaacagtggtgaaaaccaggtaaatcacgccacagacgatggcgaaatagaacggttcccaggtacttttgcctgccagttgggtggctttgaccacatcttccaggccgagtaagctaaccagtgcggtagatttgaggatcacctgccagttgttgccaatgcctggcagggcgtaacgcatcatgctcggaaacatgatccgccgaaacacttgcccacgagtaaaaccgaacgccgtcgccgcctctatatgtcctttcggcactgccataaaagcaccacggaacgtttcggtaaaataagcaccgtagataaaaccgagagtgataataccagcgaccatcggatcgatatcaatctgcccgacgcccatcgcctccgtcaccgtgtttagcgcaatctgcaaaccgtagaaaatcagcagcatcaacactaagtccggcacgccacgaatcagcgtggtgtacccttcgaaaatcagcccgctaagccgattttggctgagcttaccgccagcgccaattaaaccgatgattacagcgagcactacagagctgatagccagctccagcgtgacgagcgcaccctgtaaaataacaccactaaacccatacaacatgctgcctgtcctgtcgtgtgtggtgaattaccgcctcttgtctccctccggttacccgaagggagcgggctttctttcaccgatggcgattagccaccataaacatcaaaatcgaagtactttttcgctaatttctcgtaagtaccgtcagcgcgcatttcggcaaaggctttgttcagtgcttcgcgcagttcgttatcttctttacgcaggcccatgccggtccctacgccaaacagtttttcatctttaacagacgggccaccgaatttgtaatctttaccgacaggttgtttgaggaaaccttcgctggcagcgacctcatcctggaacgcggcatcaatacgtccggcagtcaggtcagaataaatgttgtcctgcccctgatagctgacgatttcaatgccttttggtgcccaatgttcattaccgaacgtctcctgggtggtgccctgcaatacgcctacccgtttgcctttcaggctctcgactgtcggctgaatgtcagaatttttcgccaccaccaaacgagaatcggcagcgtacagtttgtcggtgaaggctatttcttgctgacgtttttccgtaatggaaaggctactcatgatggcgtcaatcttcttcgcttttaaggacgggattaacgcatccagcggattttcgacaaacgtacattgcgtattgatgcgtttgcataattcctttgccagatcgatatcgaagccaaccagttcgccttgactatttttactttcaaatggcgcataggtcgggtcggtaccgatgcggatgttttgcggaatcgcagcaaacgccgcagttgcgctggagaaggccagaaccagagagaggcttagcaccagttttttcataatgtcctcaactgacagtctttttatagggaatatttacaggtttgttacacttatcgtgccataaaattgaccatcaaggcaaaatatcccgccccgttagacgtattatttttcattaaaaatgcttaagtatgcatttcaatgcaccacgatagtgcaacaaacctggcgtgcaccatgatgatcattccatcaggtacagcttcccagcgacgtatcagtcaccgtagacattaaagtcgaaatactttttcgccatcttgtcgtaggtgccgtcctgacgcagctcgccaagcgccttattgaaggcagccgtcagttcagcatcatctttacgtagccctacaccggtgccatcaccgaagtattttttgtcttttacactactgccagcaaaggcgaaatctttaccagcaggttgcttgaggaatccttcgctggcagcaacttcatcttgtaacgcagcatccagacgtcctgcagccagatcggaatagaccaaatcctggttggcataggccaccacatccacgcctttactacgccaggtctcgttagcgtaagcttcctgggtacttccctgcagcacaccaacatgtttacctttcagactatccagcgttggctgaatcggactacctttggccgcaatcaaacgagaatctgcggcgtacagcttgtcggagaaggcaatctcctgctgacgtttatcggtaatggaaaggctgctaataatagcgtcgatttttttcgctttcagactggggatcagcgcgtcaaagtcactggcaacccaggtacatttcacctgcatccgtttgcacatctcgttaccgagatcgatatcaaagccaacaaaatcacctttagcatctttgctactgaacggtgcgtaggtggtatcggttccgatacgtaccgtctccggtagcgccgcatagctggaagccgctgtggagagaccgactaacaaagacagagcgagaatgctcttcttcatacataaccctcaagtgaaaatggcttttttatgttgtgtattgtgttgtgtgtttgcaggctctttcatgcaggtcttatgccatcttgacgacaacagtaacattcaacgttaaatatgttaataagacgttgcattattgtcctgaagttgaagatagcaggtatagcggttgaatcgcagcgtttcgattgaatggcagaaacaaaatgtcgaggatttgatcgcggttgcaaaattgccctgaaacagggcaacagcggagttatgcgccctgccagcgggcaaagagatcttcaggaagggttatcgcaaactggtcaagaacacgattaaccgtctgatttatcacatcatcaagggattgcgggcgatgataaaacgccggaacgggaggcataatcaccgcaccgatttctgccgcctgagtcattaaacgcagatggcctaagtgcaatggtgtttcacgcacgcagagcaccaacgggcgacgctctttcagcaccacatctgccgcacgggtcagtaagccatcagtatagctatggacaatgccggaaagggttttgatactacagggtaaaatcaccatccccagcgtctggaaagaaccggaagagatgctggcggcaatatcgcgcgcatcgtgcgtgacatcggctaatgcctgcacttcgcgcagagaaaaatccgtttcgagggataaggtctggcgcgctgcctggctcatcaccagatgcgtttcgatatctgtgacatcgcgcagaacctgtaataagcgcacgccataaatcgcgccgctggcaccgctgatgcctacaatgagtcgtttcataaatagttgccctgtcagacttgcaggcagactttgcaggatttcggcgggagttgcaagtcagggtgccagaccggcaccctcagcgaaggcatcatccttcgttatgcatttcgagattttccacttcgttctgacgttgcactgctttggcgtcatcattacgtaacgtatcgaggaaatcgaggtagccctgatcaacatctttggtgacgtagacgccgttgaacacgctgcattcaaactgctggatatccggattttcagcgcgaacggcgtcgatcagatcgttcagatcctggaaaatcaacccgtcagcaccgatgatctggcgaatttcatcaacttcgcgaccgtgagcgatcagttccgtggcgctcggcatatcaataccataaacgttcgggaagcgaatttccggtgccgcagaagcgaggtacactttcttcgctccggcttcgcgtgccatctcgataatctgctcagaagtggtgccacggacgatggagtcgtcgaccagcaggacgtttttatcgcggaactcggcgcggttggcattcagtttacggcgcacggacttacgacgcagctgctggcccggcatgataaaggtgcggccaacatagcggtttttaacgaagccctggcggtacggtttgcccagaatacgagcaatttccagcgcgatatcacagctggtttctgggatcgggatcaccacgtcgatatccagatcttcccattcgcgggcaattttctcgcccagtttcgtgcccatattcacacgcgcgctgtaaacggaaattttgtcgataaagctgtccgggcgggcaaagtatacatactcaaacaggcacggattgctgaccggattgtcagcacattgacgggtaaacaactgcccttcttcagtgatgtaaatcgcttcgcccggcgcgacgtcacgcaggaaatcaaagcccagcgtatcgagcgctacgctttcggaagcgaccatatattctgtacggttctcgtcaatatcacgttttcccagtaccagcggacgaatcccgtttggatcgcggaaagcaaccataccgtggccgataatcatcgccacacaggcatacgcgccgcggattaagcggtttgtggcagcaatggcagcgaaaatattgtcggcttccagcgggtagtggcggaagttgtccagctcgctggcgaagatattaagcagaatttcgctgtcggaagtggtgttgatgtggcggcgtttttcttcaaacagttttttacgcaactcgtgagcgttggtcagattgccgttgtgggcaagcgtaatgccatacggggagttaacgtaaaacggctgcgcttcagaggcgctggagctgccagccgtggggtaacgcacatgaccaatgcccatattgccctgcaaacgctgcatatggcgagcttcaaatacatcgctcaccagcccgttcgctttacgcaaacggaagcagttattggcatctatggtgatgatgccggcggcatcctgaccgcgatgctgaagcaccgttaaggcatcataaatgctctggttaaccggcataacaccggcgataccgacaataccgcacatacgtctttttcctcgttaagccacatctcagagcacttacgctctgggcaagaaactactgctgctttgcagataatcaaaaaaacatctgatgataaaactgaattgcgggatcagctgacttttgctccagtcttcgcttttgctcaccccggtaaaggagtcgagaaagaagagaatggcagcaacaatcaacacaccgcgcaacgcaccgaaacagacgcccagcacccgatcggtgccactcaaccccgttttctccaccaactggcctatcacgaagttcacgatagcaccaacgatcagggtagcgataaacagtaccgcgatggcaatcccatttcgaaccagttcgtcttcaaagcccgtaaaccagacactcaggtaagtgtagtaatgactggcaacaaagaaagcacaaccccatgtcaccaggcttaacgcttcacgaacaaagccgcggatcaggctaaccagagaggaaaaagcaatcaccgcgattatggcgtaatcaatccagaccatatgtgtcccacgattttacgccctgtcatcctgttcggggcgcattctaacagaaaaagaaaacgtttgcgtagggatttccttcccgcgcatcaataaaaatggcgctgaaaaaatattcaacgccatcgactttttatgcctttgcggcatcgggcaatgcgtgtcggatgcggcgtaaacgccttatccgacctacggttctacccctgcgtaggcctgataagacgcgccagcgtcgcatcaggcaagaccgtattaattcggcgtatagcccattaccacgccacttaagccagaaagttgcttcaactcacccaggctacctttcagcttatctttgctggcatccggcccaaccagaatacgggtaattttaccctgcactggcgtggatgggctcgtataaacccgataaccggcaccgcgcagcttaccgacaatctcattcactttatcggcatttttcagcgcacccagttgcacaacataggctttacccgtcggtgcagctttttcttccacgaccggcttcggttctggcttcggcgcaggtggtgcttcaacctttggtttaggcggctccaccggtttcggcttcggtggggcgaccggtgcaggttccggttcaaactcggtgttattggctgcaatagtggccggatcgaggctcggtgctgcggcatcacctgcccgcacctcttccgctgcgccttccggcggctgcgtcggtaacgcctgggtggcggctggcatcatatcaggctcatcacgatcgcccgctttcggcaccagcgggatagccgcgaactcatcctgataatgttttttctgcccgtccagcagccctggaagtacaatcacccccagcgccaccagcacgatcgtgcccactaaccgattctgaaacttacttgccaccgcttctcctcgcgtcaatcacttccatgacatgtgcgaccgtgtggaaagaaccacacaccagcacggtgtcttccgctttagcgtccgccattgcggcatcccatgcctgcgcaacgctatcaaaacttttgccgttacccaaatgctcaagcagttgttctgccgtggcaccgcgcggcccttccagtggcgcacaataccagtcatcaaccacgcttttcaaccaggccagagttccggcaatatctttatcatgtagcataccgataaccgccagcacgcgcccgtttttcggtagcgctttcatacgcccggtgagatattccgccgcatgtggattatgcgcgacatcaaaaataacgcgtgggctctcgctcacaatctggaaacgtcccggcaaaattgcgctggcaatcccgtcgcgaatggcattttcactgacttccagcccgctggcacgcagtgccgccagcgctgttgcggcattcggttgcgggacaagcggcaacggcagattttccagcgtgccgtgagcatcgctaaacgcccagtcatgatcggtgacggaatagttccactcaacgccccgacgttgtaacagtgcacctttttcctgcgccacatcagcaatggtagaaggcatttccggctcaccgacaattgccggtttttcgctgcggaagatgcctgctttctcgcgaccaatactttcgcgatctggacccagccagtcggtatgatccagcgcaatactggttactaccgcgacatcggcgtcgacaatattggttgcgtccagacgaccgcccagccctacttccagaatcaccacgtcaagttgtgcctgcttgaacagccacaacgcgctcagcgtaccgtactcgaaataggtcagggaaatatcaccgcgtgcgctttcaatctccgcaaaagaggcggtgtgggcgctttccggcaattcctggccctgcacacgtacgcgctcggtataacgcaccagatgagggctactgtagacgcccactttgtaccctgccgccatcagaatgctctccagcgtacggcaggtggtgcctttgccattcgtacccgcaacggtaaacacaaatggcgctggtttcaggacgccaagacgcgccgcgaccaggctcacgcgctcaaggccgagatcgatagttttactgtgcaggttttccagataagaaagccagctagccagagggctcgcggcttgaggagtgcgtttgataatcatggtatccgctgattcgttacggtgagaatagcaaaagggcagagccagtggccctgcccttatcagttatcaggcctcaggttcctgatccggtaccgggggtaccactacgccttcacgcggcgcttcaggattcggcgctggcagattcatcaacttcgccagaatgctcgccagtttcaggcgcatttccggacgacggacgatcatgtcgatcgcgcctttctcgatcaggaattcactgcgctggaatccaggcggcagtttttcgcgaacggtctgttcgataacacgcggaccggcaaagccgattaacgctttcggttcagcgatgttgagatcgcccagcatggcgaaacttgcagaaacaccgcccatcgtcgggtcggtcagcacggagatgtacggcaagccgcgctcctgcatttttgccagtgccgcagaggttttcgccatctgcatcaggctcatcagtgcttcctgcatacgtgcgccaccagaggcggagaagcagatcagcgggcagttatcttccagcgcctgctcaacggcacgcacgaaacgtgcacccacaacagaccccatactaccgcccataaaggcgaactcgaatgccgcagcgacaaccggcattccatacagagtgcctttcatcaccaccagcgcatctttttcgccggtttctttctgcgcagatgccagacggtctttatacttcttggagtcacgaaacttcagcacatctttcggctcaagctcgctacccagctccacaaggcttccttcatctaacaggctatgcaggcgattacgcgctgtcatacgcatgtgatggtcacacttcggacagacctcaagattacgttccagctcagcgcggtataaaacctgaccgcagctatcacacttagtccacaccccttcaggaatgctcgccttgcgggtgggagtaatgttgcttttaattcgttcaatccagctcattagggacctttctgtctgaacctggttcgatgccagttttatctttggggacgcataatgccatttttgcccccaacagaccatgaatgttgcacattaaaacataacagcccgaaactttggataaaaaagtggtcgaaccgcggagttactttttattttgcggcgcgtgccgcagcgcgtttgtgacggattatttcgatgacgcccggcaaaatagaaaccacaataatcccgacgatcagcagcttaaggttatcctgaaccatcgggattgtaccgaagaaatagcctgcgtaggtaaaaagcagtacccacaacagtgcgccgatcacgttataagcggcgaaatgacggtagctcatgtggcccattcccgcaacaaacggggcgaacgttctgacgatcggcacaaaacgggcgagaataatcgttttgccgccatgtttctcataaaactgatgggttttgtcgagataactgcgacggaaaattttgctattgggattactgaacaacttttcaccgaacaaccgcccgatagtgtaattgaccgcgtcacccacaatcgcggcgatcagcatcagcaccaccatcatatggacgttgagatcgttggtttccagacttgccaacgctccggcaacaaacagcaaactatcacccggtaaaaacggcgttaccaccagaccggtttcacagaacaaaattaagaacaaaatggcataaacccagacgccgtactccgcgaccagctctgccagatgcacgtcaatgtgcaggataaaatcgatgaggaaataaatcaggtccatatttgcctatgccttgtactcgtcatctttcaggctgtaactacgttggctacagcctgaaatgttccgagcattattctcgttagtccgccagaaatagcgggcccattggcggttttggaagatcataccggtcagggtaatccaccgcgaccagatacagcccttccgcttttgccgttgctgccgccagcgttctgtcctttgccgccagcaactctgctatccagctctccggctggttgtgggcaccgacttccatcaggctgccgacaatattcctgaccatatgatgtacaaaagcattcgctttaatatctaccaccacataaggaccgtgacgcgtgacattaatatgcataacgttgcgccacggggttcgggactggcactgcaccgcacggaagctggtgaaatcattctcgcccagcaagcattgcgcagcccgatgcatccgttcagcgtccagcggttcgtaaaaatgggttacccctttactcagtaccgccgggcgcagccgatgattgtagatgatgtagcgataacggcgagccgtggcgctaaatcgggcatgaaaatcatcaggtacagttttaacccaacgcacagcgatgtcaccaggtaaattcgcatttacgcccaaggtccacgccgcgtctttgcgcagcgcggttgtttcgaaatgcacaacctgcccggtaccgtgtacccctgcgtcagtacgcccggcgcagaagacggtgatgggttcgttcgccacctgggagagcgccttttccagcttctcctgcacactgcggacttcgttctgccgttgccagccgtaatacttactgccgtcgtactcaatgcccagcgcaattttataaactggcggttgttgctggtcggacattagtacagatactcctgcaccagtttctcggcgatttttactgccatcagcgcgccgccaaagcgaacgttatcggccacgctccagaactggacttgctccggcataccgtagtcattacgcacgcagccaacagaaagatgcggcgtaccgctagcatcacctacctgagttgggaattcgttctcttcagagagcacaatatcttcgccttgaacaaacgcatcacgcgcttcttctgctgccagtggacgcagagcttcaaagttgaccatctgggcatgaccgtagaataccggtgcctggacgacgctagcgctaatcatcagcccttcgtcctgcaggattttgcgtacttcgtcaacgatacgacgttcttcacgcacgctaccttcgctatccggcagtaacggcagcatgttgaacgccagctgacgcccgaagaaatcttcttcgtcaatcggaatgccgttgagcaatttcgcactctgccccgctaacgcatcgaccgcttttttgccctgggcggaggcactaatcaggctggtaacgctgatacgacttaaaccgccctgatcgattaacggtttcagtgccgccagcagctggctggtcagactgtctggtacggcgatgacattccggttccggtaatctgtcagtacaaacgggtttacttccggcaccaccagcggtacgtcgggttcgagagcaaacaatccactgctgtcgatcaccaggcaaccactgttggtcgcttcttcaacccaggcagcggtagcttctttgcctgcgacaaaaaatgccagctgcgcctgcgtccagtcgaattcagcggcatcctgcacggtgattgtcttaccaccaaagcgcagttgttcgcctgcgctttcgttacgtgccagtgcataaatttccccaaccgggaactgacgttcagccagcgtttcaagcagggcttcgcccacagcgccagttgcgcccaggacggcaatgttccagccttcagacatggtggtttactccagaaatagcaaagctccctgccaatgttacagcagagagcatgaagaagagattaacgtgccggatgatgaacggcgttaaaacccagtttacacagcaaacttgccgcactggcgtcatcacaaattacatacagagaactccattcacggcgctcaagatagtttttgcgcagtttatcgaactcacccggtatcccggcgactttacgcagcggtgcgtcatcgcggcgcacatcatacaccaaatgcaccagccttttcagcgtcggttgatcgagcgggccatgcagcgtaatgcgaccaaactctggcgcaggcagtaatgtatccagcgcaacgtgctgttcatgcccaataaacttgctataagcttcaaacacttgcgtagtaccgcgtgctttaccttccagggtatagcctgcgatatggctcgtgccgatatccacttttttcagcagctcgacgttgagttccggttcgccttcccagacatccagcactacgcttaacttctggccttcattcaggcaggtcagcaacgcagtattatcgacgactgcgccacggcaggcgttaatcagaatcgctccgggcttcaggctacggatcagtttttcatccgccagatgtagcgttttgtacggaccatctttaaagagtggcgtatggaaagtcagaatatccgcgcgctggactaactcatccaggctgcggaaatcaccctcatccccacggtcggcgcgaggcggatcgcaaagtaaggttttaatccctaacgcttccagtcgcgcctgcaatcgacgtccaacgttaccaacgcccacgatccccaccgtacggtcgtacagactaaatccatcgcgttcggcaagcatcagcagggaggagaaaacatattccaccaccgcaatcgcattacagccaggtgcagcggaaaaaccaattcccgcctgcttcaaccatgcttcatcgacatggtcggtccccgcagtggcagtgccaacaaatttaatgggttttcctgccagcaaagattcattcactttcgtgacgctacgcaccatcagcgcatccgcgtctgccagttgagcgacggggattggacgcccgggaaccgcggtcacctcacccaaacggctaaataagtcgcgggcataaggcatattttcatcaacaaggattttcacgtttgtgttacctgtatgagacgagagttaaccggacaagtgtgccataatctcgcggccaggcatacttgcgaagatttcaggtataaggatacgtaatgatacaacctatttccggccctcctcctgggcaaccaccaggtcagggagataatctgccgtctggcacgggcaatcagcctttatccagtcagcaacgtactagcctggaaagcttaatgacgaaagtgaccagtctgacgcaacagcaaagagcagaactgtgggcgggtatcaggcacgatattggtctgagcggagatagtccgctgcttagccgtcacttccctgccgctgagcataatctggcgcaacgtctgctggccgcgcaaaaaagccattctgcccgccagcttttagcgcaattaggggagtatttacgtctggggaataatcgtcaggcggtcacggattatatccgtcataactttggtcagacgccgctgaatcagctcagtccggagcaattaaaaaccattctcaccctgttgcaggaagggaagatggttattccgcaaccacagcagcgcgaggcgaccgaccgtcctttattaccggcggagcacaatgcgctaaaacagctggtgaccaaacttgcggcggcaacgggggaacccagcaaacagatctggcaaagcatgctggaactttccggggtgaaagatggcgagttaattccagcgaaactgtttaaccatctggtgacctggctacaggcgcgtcagacgctaagccagcaaaatacgccgacgctggaaagtctacagatgacgctaaaacaacctttagatgccagtgaactggcggcgttaagcgcatatatccagcaaaaatatggtctttctgcgcaaagtagcctttcttctgcccaggccgaggatattcttaatcagctttatcaacggcgggttaaagggattgatccgcgtgttatgcaaccgctgcttaatccttttccaccgatgatggacacgttgcaaaatatggcaacgcgtcccgcgctgtggatactgttagtcgcgattatcctgatgctggtctggctggttcgttaaccccgacgaaaactcagtatcgtgacaataatacccagcaccgcagagatcgccccggcaagaaatacgctagagtaaccaaacgtggtcgccagcattcccgccagcggcccggagacgccgagggcgatatcctgaaacgcggcgtaaccgcccagtgcggtgccgcgaacttgactggggacgcgtttaaccacctccacgcccagcgcaggaaagataaggctacatccggctccggttaacgccgcgcccgctaatgcgacccatgcacctggggcttgccagagcagcaacaagcccaccgtttctacaagcagagagacaatcgccactttcacgccgccaaaacggtccggcatccagccaaacatgacgcgcatcacgacaaatgcgccgccaaacgcggtaagagtaaagcccgccatcgcccatcctttgctggcaaagtagaggctaacgaaagtcccgataacagcaaaaccaacgccttgtagtgccagacctaaccctggtttccagataagcccgacaacgctccacaggcttggacgttctcccgccagggccggtactttgcgcactgtgccgttacaggcccacgccagtacgggtaataccattgtggtgatcgccagtgcggcaaaaccgtaatggctatgaatcaacaggccaagcggagcaccaacagcgagggcaccgtaaatcgccattccgttccaactcatcactttgccagagtgttttggccctacgatgcctagtccccaggtcagagcgcctgtcagtaactggctttcaccaaagccaagaatcaaacgcccgacgaccaacagagcaaatttgaacggtgcggagacaggcaaaatcgccgccagcagcaacgcgccgccagccagaccacaagctaacattccctgaagcgcgctacgttttgcaccatattgatcggccagtcgcccggcgtaaccacgcgtcagcaccgtagccagaaactgaatcccgacggcaatgccgaccatggtattgccatagcccagttcatgatgaacaaacagcgggataaccggcaacggcaaccctacggtcatgtaggtgagaaaaaccgcaaaagcgatgcggaagaggctaaaattggcagaagatcgtgtttcggtttggcttacagcagtcatgcattactccagaatgcagcgcaaggcgaggagtatccccgtctcatctctctggtttcagggttacggtgcgttggcaggatttaacgcgtacgtcttttcagaaggaaatcgacaaagcgggaagtttgcctggaactggcggcgattgtcaatgatgtgaaaaagggaaccatcaggttcccttttgcgttagtgccggaggccgcattggcgcgtaacgtcggatgcgacgctggcgcgtctactccgacctactgcgaattaatctttcagcttgcgcattaccagcgtggcgttggtgccgccgaagccgaagctgttagacataacggtggtcagttcgcgatcggtcgtttcggtcacgatgttcagacccgcagcctgctcgtccagctcttcaatgttgatgctcggggcgataaagccgtgttccagcatcagcagagagtagatagcttcctgtacgccagcagcgcccagagagtgaccggtcatggctttggttgcagaaatcgccgggctcttatcgccgaacacttcacggatagctgccagctctttcacgtcgccaaccggagtgctagtaccgtgggagttcaggtaatcgattggggtatcaacgccatgcatcgccatcttcatgcagcgtactgcgccttcgccagacggagcaaccatgtctgcaccatcagaggttgcgccgtagccaacgatttcagcatagatgtgagcaccacgcgccagcgcgtgttccagctcttcaaccactaccataccgccgccgccagcgataacgaaaccgtcacggtgagcgtcgtaagtacgggaggctttttccggggtgtcgttgtatttagtagacagcgcacccattgcgtcgaattcgcaagccatttcccagcacagctcttcgccgccgccagcaaacacgatgtcctgtttgcccagttggatctgctctactgcgttaccgatacagtgtgcggaagtcgcacacgcggagctgatggagtagttaacgccatgaattttaaacggggtggcgaggcaggcagaaacgccggatgccatcgctttggtgaccacatacgggccaaccgctttcaggccgcgcgggccgcgcattgcgtcagcgccgaacacctggaaacgcggggagccgccgccggaacctgcaatcaggccaacgcgcgggttattctggtaagcttccggagagaggcccgcatcagcgattgcctgctccatagaaaggaatgcataaatggatgcgtcgctcataaagcgcacaactttgcggtcaatgaggccagtggtatccagttttacgttgccccagacgtggctacgcatgccggaatccttcagctcctgagagaaagtgatcccactacgtccttcacgcagagatgccaggacttcctgctggttattaccgatgctggaaacaatgcccaggccagtaatcactgcacgtttcattcaatacctctgtaagtcgcacatagagtaagtttcgaatgcacaatagcgtacacttgtacgccgaacaagtccgatcagccatttaatagagaaatttgcgcagccttacacacatcgctaagatcgagccaccgcctgtaagacgagtaacttacgtgaaacactactccatacaacctgccaacctcgaatttaatgctgagggtacacctgtttcccgagattttgacgatgtctatttttccaacgataacgggctggaagagacgcgttatgtttttctgggaggcaaccaattagaggtacgctttcctgagcatccacatcctctgtttgtggtagcagagagcggcttcggcaccggattaaacttcctgacgctatggcaggcatttgatcagtttcgcgaagcgcatccgcaagcgcaattacaacgcttacatttcattagttttgagaaatttcccctcacccgtgcggatttagccttagcgcatcaacactggccggaactggctccgtgggcagaacaacttcaggcgcagtggccaatgcccttgcccggttgccatcgtttattgctcgatgaaggccgcgtgacgctggatttatggtttggcgatattaacgaactgaccagccaactggacgatagcctaaatcaaaaagtagatgcctggtttctggacggctttgcgccagcgaaaaacccggatatgtggacgcaaaatctgtttaacgccatggcaaggttggcgcgtccgggcggcacgctggcgacatttacgtctgccggttttgtccgccgcggtttgcaggacgccggattcacgatgcaaaaacgtaagggctttgggcgcaaacgggaaatgctttgcggggtgatggaacagacattaccgctcccctgctccgcgccgtggtttaaccgcacgggcagcagcaaacgggaagcggcgattatcggcggtggtattgccagcgcgttgttgagcctggcgctattacggcgcggctggcaggtaacgctttattgcgcggatgaggcccccgcactgggtgcttccggcaatcgccagggggcgctgtatccgttattaagcaaacacgatgaggcgctaaaccgctttttctctaatgcgtttacttttgctcgtcggttttacgaccaattacccgttaaatttgatcatgactggtgcggcgtcacgcagttaggctgggatgagaaaagccagcataaaatcgcacagatgttgagtatggatttacccgcagaactggctgtagccgttgaggcaaatgcggttgaacaaattacgggcgttgcgacaaattgcagcggcattacttatccgcaaggtggttggctgtgcccagcagaactgacccgtaatgtgctggaactggcgcaacagcagggtttgcagatttattatcaatatcagttacagaatttatcccgtaaggatgactgttggttgttgaattttgcaggagatcagcaagcaacacacagcgtagtggtactggcgaacgggcatcaaatcagccgattcagccaaacgagcactctcccggtgtatagcgttgccgggcaggtcagccatattccgacaacgccggaattggcagagctgaagcaggtgctgtgctatgacggttatctcacgccacaaaatccggcgaatcaacatcattgtattggtgccagttatcatcgcggcagcgaagatacggcgtacagtgaggacgatcagcagcagaatcgccagcggttgattgattgtttcccgcaggcacagtgggcaaaagaggttgatgtcagtgataaagaggcgcgctgcggtgtgcgttgtgccacccgcgatcatctgccaatggtaggcaatgttcccgattatgaggcaacactcgtggaatatgcgagcttggcggagcagaaagatgaggcggtaagcgcgccggtttttgacgatctctttatgtttgcggctttaggttctcgcggtttgtgttctgccccgctgtgtgccgagattctggcggcgcagatgagcgacgaaccgattccgatggatgccagtacgctggcggcgttaaacccgaatcggttatgggtgcggaaattgttgaagggtaaagcggttaaggcggggtaatctgctctcgcagtgtttgccggatgcggcgtgaacgccttatccgacctacgtgtgacgtgtaggcctgataagacgcgataagcgtcgcatcaggcatgctgctccagacgccgcaacttactgctgactcgcctgctgaaacaggttttcccacatatcggtcaccagcgcctggtcacgcgggctcaattcaccagcaccaatggctttttccagactctggctaacggtcgtatgcaccgcctgagcggagtggtcatcaccactttccagttctgcgatggctaatgtcaggtggccacgcaaatacccactggcaaacaactcatcatcactggcatggtcaaccataccgtcgattaatgccagaatgcgactttcaaactccgcgatcatcttctttcctcattgtaaaacgtggcgctggcttcagttgagcgcttccggccacgggaactgttccgccgtaagttccggcgtgtgataataattttgtagtgctttaatgaagcgtgccggacgttccggaatgccatttgtcagataatccatcacctgcgcatgtactcgccgttgaaacaccacacgatccggttcgaaatccccttccagattgtcgcaactgacgttaaacggatatcccgccgccacacagaacaaccagtcgagcgcctgcggcttcacttcaacatcttcaaactggctttgcgtttgggcatcgcgtccgtccgggcaataccagtagccgaaatcaaccagctcacggcgcgctttcccggcaatacaccagtggctaatctcatgaattgcgctggcataaaagccatgagcaaagacgattcggttatacggtacttccgcatcagcaggaagatagatcggttcgtcgtcgcctttaatcagacgggtattaaaatcatcggcaaagcagctattaaaaatttcaatcaactgctcgtagtggtgtgtactgttcattagttcatccccaaccagtggaggatctcctgtccgtggctgtcgtaaagtaatttggcactcatcaccgcgctgacgataacaatcatcgggcggatcagcttttgtcctttgctcaacaccagtcgactacccatgcgcgcgccgaggaactgccccaccagcatgacaaagcccgtcgcccaaatcactttgccgccgagaataaacagcagtaaaccgccgatgttactcgttgcgttgagtaatttggcgtgagccgtggctttggcgaggttaaatccgcacagcgtaacgaaggccagcgcgtaaaagctcccggcagccgggccaaagaatccatcataaaaaccgacgcagccaccggctattaacgcgaagggtaaaccgtacatccggcgctggcggtcttcttcacctagctttggcatcagcaagaaatagaggccgatacaaattaccagaatgggcaaaatctgccgtaagacatcagcctgaacgtattgcaccagcagtgcgccgctcatactgccgacaaaggtcatggcgatattgagtttctgatcgcttaaactaaccactttgcggcgaataaagtagatagtagcggaaatagagccgccgcaggcttgcagtttattggttgccagcgcattagcgggagacatccccgctgccatcaatgccggaatggtgagtaacccaccgccaccggcaatgctgtcgataaatcccgccagcatggcgacaaaaaagagaactcccagcaacagcggggaaaccataaacaggctattaaacgtttccattagatcacgtgctcatccagtagcgcctggcaggaaggcggcaacggaggcggtgtcttcttctcaggctttgttgttcccggttttggaggttcaaaccagctttgcagttctgccccgcaaccatcgccacttggcggtaaaggttgatcttcacactccagactatcggcagggcaacgtaatcgtacatgcatatgcgcgcgatgctggaaccagggtcgcactttgcgcaaccagtcgcgatcggtgcccgcatcaaggcaaagttgttgtttaatcgccggattaacaaaaatgcgcgtgacgtctttgtcctgggcggcgagtttgatcaagctgaaaatttctggcttccacagcgtggagacaacgtgtttaccgtcgcgggaaactaagtccagtgcttgcgggcgcaagagctgcgcggaggtccagcgagttttcggcagttgcagaaagatatcgacatccagtccggtctggtggctggcatgaccgccgttgaaacgcccaccagcgggcatccccatatcgccaatcagcaccgtacccatgcccagattgctcacctggctactcagacgctggataaacatcaccagatccgggtgaccgaaatagcgacgctgatcggtacgcatgacctgataatgttcggactgtatcggcagcgtgtcagcgccgacaatacagccattagaaaaactgcctatgctttgtgcgctacccggcacaggttgggttattttttgccacggcgtcgctgccaggctggcgctactggcaagcagagccagcagcgcaatcgcggttttattcattttttaccagcgtggaatatcagtcttcacatcggcattttgcgcccgttgccgtaacaggtgatccattaaaacgatcgccagcatcgcttctgcgatcggcactgcgcggatcccgacacagggatcgtgacggcctttggtgatcatctcaacttcttcgccaaagcggttaatggtacgacccggcacggtaatgctggaggtcggtttcagcgccatatgggcaatgatttgctgcccgctgctgataccgccgagaatgccgcccgcatggttgctctggaaaccgtctttggtgatttcatcgcggttctggctgccgcgcagcgccaccacgtcaaagccgtcgccaatttccacgcctttcaccgcgttgatgctcatcagcgcatgggcgatgtcagcatccaggcggtcaaagaccggctcgccaagtccggcaggaacgccactggcaacaacggtgactttagcgccgatggagtcgccctcttttttcagcgcacgcatcaactcgtctaacgcgtcgattttgtcggggtccgggcaaaaaaacggattttgctcgacctggctccagtctttgatatccagcggaatgtcgcccatctgggtcaggcagccacggatttcaataccaaatttctcggcgagatattttttggcaatagctcctgccgccacgcgcatggcggtttcgcgggcggaagaacgtccaccgccgcgataatcgcgcagaccgtatttttgttcgtaggtgtaatcggcatggcctggacggaaaacgtccttaatcgcactgtaatcctgagagcgctggtcagtgttttcgatcaacaagccaatgctggtgccggtagtaacgccttcaaaaacaccggagagaattttgacctgatccggctcgcggcgctgggtggtatagcggcttgtcccagggcgacgacggtcgaggtcatgttgcaggtccgcttccgtcagcggaatgcctggcggaacaccatcgacgatgcagccgagcgccagcccgtggctttcgccgaaggtggttacgcgaaagagttgtccaattgtgtttccagccatcacggctccgttattgttgtgtttgcgtgtttacttaatctttataaatcgcgaaatgttctcgtgcggcaataagctgctctttggtgagcataaacacaccatcgccgccgttatcaaactccagccaggtgaacggaacatccggatattgttccataagatgtaccatgctgttgccgacttcacaaatcaacacgccatcatcagcaaggtaatctgccgcgttaccgagaatgcgacgcgtcagtttcaggccgtcagtgccagatgccaggcccagttccggctcgtggcggtattcgtttggcaggtcggacatatcttccgcatcgacatacggcgggttagtgacaatcaggtcgtactgcactttcggcaagtcgcggaacagatcggaacgaatcggaatgacgttgtggatcagaccgtgttcttcgatgttctgttcagcaaccgccagcgcgtctggagagatatccaccgcgtcgacttctgcatccgggaaggcataagcacaggcaatggcgatgcagccgctaccagtacacatatctaaaatatgctgcggttgcttgctgataagtccggcaaatttattgttgatcagttcaccaatcgggctgcgcggcaccagcacgcgttcatcgacgtaaaattcatggccgcagaaccacgctttgttggtcaggtaagccaccggaatgcgttcattgacgcggcggatcacgcgttcaacaatacggtgtttttcgctggaggtcagacgcgcggtgcgcatatcttccggaatatccagcggcaggtagaggctaggcaacaccagctgtacggcttcatcccacgggttatcggtaccgtgaccgtaccagatatttgccgcgctgaagcggctcacgctccagcgcaacatgtcctgaatggtttgcagctcatttactgcttcatcaacgaaaattttatccacgtattcctccagggcatgatcgcaataatttcggcggctagtttgccatgaagatgacgataaatcagcattcacgcgcggtgagtgaggaaaaatacgtttaaaacgatcgattgcgctacgagtcgggtaaactgtaggaaaattagaaatagagacagataaatgaaaaagaaaacaacacttagcgaggaggaccaggctctgtttcgccagttgatggcggggactcgcaagattaagcaggacacgattgtccaccgaccgcagcgtaaaaaaatcagcgaagtgccggtgaaacgcttgatccaggagcaggctgatgccagccattatttctccgatgagtttcagccgttattaaataccgaaggtccggtgaaatatgttcgcccggatgtcagccattttgaggcgaagaaactgcgccgtggcgattatagcccggagttgtttttggatttacacggtctgacgcagctgcaggccaagcaggaactgggggcgttgattgccgcctgccgccgtgaacatgtgttttgcgcctgcgtgatgcatgggcacgggaagcatattttgaagcaacaaacaccgctgtggctggcacaacatccgcatgtgatggcctttcatcaggcaccaaaagagtatggcggtgatgcggcgttgttggtgttgattgaagtcgaagagtggctgccgccggagttgccctgaggagttgagcgcgttgcgccaggtacgggtaatggcaggggcgaatgcccctgcctggtgtatctaagggttacaactcattcagtatgtactggaaccggcaagtagaatcgattggctgcatactgctggtatcaacacgcacgaccatatcgtgtaactgtttgtccgttatagggtgtcgatttggcgtgacgctgacttccgccttgtcacatccgctcgcggtaaaagttatcatctgtgcaacccagcggcagtaaccacctgtttcattcatctgcgtactgtcgcacaacttcccatctttcatcaaatacgtactaagcgttttctcaaccacaccgcccgtgctctgcagggtgagcagtttactcttactgacataattctcattccaactaacgtcataaggttgaacagaaacggatggacaaatcgtgtcgtgactatcaggcccctgatacgtcacgccccctggagaggcttcagagtcattcataataaccaaccatggacaagaaaagtaagattcaatctctgcagagacaataacctcaaatgtataatacccgcagttccacccagacggtaatccaggacaacttgctttgttgatattttgatggtagccaatcagcttaacgctaggggcaggaggaggaccactccagctcacattttgcaatatttccccagtcatgagccattgactacttttatattcaccaacgtacactgcggatggcatcattatttttaaattaaaagtcgcaatattacggctatcaccgttgtaaccgtagtaaacgtcaacgctatgcccggcagccatagcttctgtagtagcaataagcatgaccagagcgaacaaccatcgtagtattttcattttaaatatactcaaatgtcgcagttaaagaggcggtaaattcaccgatcgtcacatcacggccgcttttcgcctgtagccaggctctgaaattgatatcgttattgccattggttagcgcaaaggtcgccccatttgtattgttgatggcaacctgcattccgtcggttttttccatgccaattcccactccctgagcggtactactcgtatccagtgccagaaaaccgggttgttcgctgtcttctacccccgtgagcgtgacttttacgttgtatcccgccggccctttgcaatctttcagcttaaagactacgggtacacgagcggactggcctgcaacgttcaaatcctgacgactgaccgtgggaaagcgcacctctgccagatattggccatccaccaccagcgcacaggatttacttaataaattaccggagaaatgcagattattatctgccgcgaataacgtgctactcattgccaatatcagccccgctaacaggacgtaaccaccggactgaatcatacttttattcattgataatccacccgtaatgttgcgtaagcgctaaaattcgtatcgcttaacacagcatcactcgcttttaccggtacggcctccagcttcggcttttgcgtaaaatcagtggcgttgatagcaagcggagtattgagtttaaaacgctgaccatcgtgctgaagctcgataccaaaaccgggtacatcagtttcaattgctgcatcattaaaactggtttgtgtaccagtccaggtgagggtcatctcccaatctggatgacgggtcgtgctgtcacaagtgagttcatatggcacctctttacgaccatagttgccgttgatgtcgtcgataatgagatcgcgaaattcgacttcaatggttttaccaccgctgatgctacaggttggcggactcaataatgtcccgtgaaaggtgatgtcttcatcagcagcatgagctatggcgctactgacacaaagcagggttaagaaagtctttctcattgatagtccaccaccatggtcaaactggcgttaaactcgcccgcagcaagttgcgccccgcttgccttcacaggtacagccttcaactgtggctggttattgatattaaatggcgtccagctattttcaccgacggcaaacaaactgttatcggcgctattttctatccgaatgcccagcccggtgatattggtactgagtaccgtttcgccgttaatcgtactggtattgcccttaagttgcatccgcaagtcgttagcaagactgtttgtgcagttcaacgtgtatttcgcatcttgccgataattggtgccatcaacgttatcagcaatcatattgccgaactctacctggctgcccttgatactacagggtggcggagcatcgaccaacacgcgcagaattaaatccacgggtttactaccagccatagcagataaactacagacactgcataccagcagccctgcgcccactacaaacttttgactcataactccccccgtcatcagcctttgcggctctgctcttcatccacctggcagctgttgccattgcactggaagaacagcggcatccgtgcgccaaagtcgttgacgtaagtcagcaccggtacgctatccattttcacattcagcggtaccgtggttttcggctcaatgaccagagggctgaaccctgcagctggattaccgtttttctgcgcactggcgttgctgataatcacgtagtacggcgttgggttattgacggtaaatgcctgaccgctgcgggtgagcgtcaccttgtgctgccacggacttttcatactgaccttttccagcgcctttggtcgccagaacaacttgatacgcgtttgcagcgcgatttgcagggtattgggtttgttactttttggcgggatctcgcgcacgttaaagtagaacatgctttcacgatcggctggcaatttgttgatatccggcattccctgcacttttacctgcccgttcatcatactatcgatgcgttgcactggcggcagcacagttaacgggctggtgatcttgttacccttttcatcttcaatccagctttgagccagataagggagtttcggatcgttattacgcagcgtcacgctgatacttttgtcgctttcattaaatatcaaacgggtacgatctggcgttacagacgccagggcagacaaactggtagcgctaagcagtaacgccagcgtcatagcacccaatttggcagagcaaagtaaatcagacatggatcattccttaatcacgttattggttagcactaacagaaacagggggatcggtgggtgtcacctgttgcgtctgctcctgaatgacaggctttatgtcatcaggaacaaccggcgcgacgttgcctttatgctggcatggcagtaacaagccgttaaacagatcggcaggcagcgggtccggcaggttgatatcgcaatgcgcaacaccactccagaacacactcatatgttcgccaggtttcaccccagccagatagacactaccgtcatcatcgacaaggcccactgtctgctcgttatcattttttacttctgcgccaaacggtggatggctgccatcttgtaaacgcagcaccgccatcgctttttgaccactgatgacggcaaatttgcggtagccaatggctccttcagttagcgtggcttgcaccacgctctgggttgcttcggcgttttccggcaatttgttgaggtcgatatacgcctgattgcgataataattgttaacgtcagaaacgacggctttaccaaacatattggtataaacagcagccccgttaccttccaccggaacatcggcaacgccatcggcatcaatcagcaggcgtgtcccgcccatattctgggtacggtgaagtgcgccgccgtgggtagtaagcgttgcgccgccctgtaagctcaagcccgcagaggtgtattgcccttcatggtagttcgcactgaggtcaacctgcgccaggctaccatcatggctgtagtagccatcaacgctggtgtgtttgtcactggtgccgatgttcaactgatagtgagtcgcgtcatcgacacggctaaaataaccgacctggctgctgtccgtcccactgccatagttgccgttatagctaacggtactgttgtcgccccacggcatactgagcgaaatttacatgcccttatccgcccggttgtcatactcgtagcggtagccagtcagggaaacgctcatattacgaatgctgcccatattgaaatagtgggagagcatgatgttgtagtttgtctgctcctcacgatcccagtaggtatggcgggtatagttgagataaacgctaacacccgcatcgcggaagttctggttataagtggcggtgtacatctctttgtcgttgcccgtacggaccatttcgctgtcactggcatccagatactcgctcatggtcataaagttctcttcgctgaagcgatatccagcgaaagtgacgcggctgttgagctggtcaaagtctttggaataactcacacggaaggagttaccgtccaggctacctttgccataagcggtgtctttatccagtttggtatggctatgagtaacatcaaacgcgaccgcgccgaaggtagacaaatcgcgaccgacgcccagcgccgcagactgatagttttcatcacccagcgcaccgccatataagctccagccgttagcgatgccccaggaggcttcagcaccagagaaaaatcccccctcgacatggtggccccactcttgcggacgtcccatcatgatcttatagcgaacctggcctgggcgagtgaggtatggcatgctggcggtgctgatgtcatattcctgcacctggccgttctgttcttcaatgcgaatatgcaacgtaccggagacggaatcaccaagatcctgaatacgaaacggtccagccggaacctgcgtttcgtaaatcacacgccccatctggctgacggtcacttttgctgtggtgtgtgccacgccggaaatgtctggcgcgtagccgcgcagattgggaggcaacatttgatcgtcagtgctgacactgccaccaacataattaaaaccgtcgaaaatatcggaattgaggtaatcttcgcccagcgccagtttggcttttaaactcggtaacgcccgccaggcataatagcgactccactcccattttttttgtgtgtcatcgccgccaaattcatcgtcatcatcattactgcgcgtatgttgatagttggtctgccagtcagcgcgcatacgccatggccccaggttaaccccgaccgtcccgttgccgctgatctcgttactgtcatcgccgccattttcttcgtgtcgtgtttgcgcagtgatgctgtagtccgcaatgatcccggagatgccatcatcccaacgagaaggtggatcccagtcgggccaggtatattcgaggtaagcctgcggtagactaatgactaatgcggactggcttaaatcagccttaatttccacgccttccagttgaccgggcttcaggcatttaccatcgtggctccattgcagatttttcgccacgtcttcttttaaaccaaactgcgccaccagttccggtgtcagacaagcatagcttttgctaacgtcatcttcaccagcataccagtaaatatcgtactcttccgccaatggctgtttatttagttgaacctgtaaattgtattttccgggctcaacatacccctggctggaaaaacgcttcagatcaatttttgtgtcgccttttaattccagaaaacgggaatcaaactgaatgtcgtcttcagcccagacactgctataactcccactcattgccagcgcaatgcaccacggaagaatccgtaatcgaaaaagagaatggtcaggcatacacgtttttatccgtttttattcttgttcggtcaaaatccatttaaataccccatagcagtgtcgctatgggggtatgccttacaggtaagtaatctggaaggtggtatttgcttcgaaattacccagatctggcgcatcagctgcgccgaccagccaggctttaaagttcagagtctgcttcgctttgcctttattagtggcagtatctttcacgattttctggtcaatacccatgccgcttttgtaagaggtacccagagagtcaccgatcgccaggctaacattgttaaatgccgcaccggtatcggtattgaaaatggtgtaataattgccgctatttgcagaagaaacggtaccagtaaaggtagtggtcattgtttcctgagtatcaaatacgcaatcttgcaggcgaatctggaaatttttcggcgtggtggtgccgttatttttcagtttttcggcaccgatatcacccatatcaacttccagtttgtgatcgtccggaacgatagaacacacactgtcttcaatggtgccgtaaaaacgtgcagtaccgttgttacccgcagcgattgttgccgtagaggtgaacgcgcccatcaccattgccgcagcaatagctgttttaacaaacttactcattatttgtccttaaactataaataattaaaatataaacattgcaatacattgattcagtcaatagccaatgtttatacccagccattgaatacggcatgcgatccaaaaaaacaggtcgtaaaaaatgtattcgttggtgtggggtcgaatagtgatgttttcactcccctgattcaatttaattttactaatgagtaaatgtagatttaattaatatattgataggggaaagattatcttaaggatcttctaaaaaaacacgaaatatatatttagaaaaaacaggaagcatatcaacaatgaatgccaatagcttaaaaaacaaacaatgaacatataatgcgattggcattaacccgcttttgtcgatataatatataaacactatagccagaatttaatcaagtttcaattacgtcctgcctgattattcaactctattttctccattatctgtattaataaatgataatgagtgtcaaacagacattattcatttcaacatgtaactttgggcaaaatcaagatacgcgcagaagaatactttccgaatgaaagttaaaggtgttttatttatagatggggagagtcttcgatagtagtgaggttgacagatatccgctgcctgatgagcaattatgcccaatgaatctacctcattgggcataatttggaactcatcagatagcttttgccatcttcagattacacgggctcatctgccagttgaatgtgccgtttccgctttcatcaagcgttacgctggcaatggcgctggtggtaaacataggcggcgtttcgcccggacataactcggcaaccagatacccgactaacggtaagtgagagatcaccagtacgctagcaacaccttcattggtcaacgcctgcaaataggcactgaccagaccaacatcgccgcagggcgttaactccggcagaacttctgcactggaaggcaggttcagacaatcccctacttcttccagtgtttgctcggctcgcaggaacgggctcaccagaacgcgttcgatttccactttttgacctttcagccagttcgccatcaggcgagattcgtcacaaccattagtggtcagaggacgaacggaatcactggcggcatcgagggctgcgtcgccgtgacgcatgataaaaacttgcatattgcaccgcttttgttaaccagattcgcccgttttctttcatctgaaaccagagaaagaaaacggtggccggcattgtgccttatccattcaccgaatgaaacgctgttttttacctcaatggcgtaagtatagtcaatatgcgtttacattttgaccaacactccgccattcagcgcggattcatatagctttgaccttcttattgcaggtcagttgcagttgttttccaaaaactttccccacgcgcgcccatctcgaccaaacgctcgcaaggggtaaaacgggaaccatactgcgtggcaagtcgttgcattattgcaaccacttcgcccgcgccgagagaatcgatatagcggaacggtccaccgagaaatggcggaaaaccaatgccaaataccgcgccaatatccccgtcacgcacgctacggataacctgctcatcaacacaacgtactgcttcattcagcatcaacatcacacaccgttcagcaacctgcggtgcggagattcgcccctgcccttgtgtgccaatcagcgggtaaatggcgggatcgacctgttttttgcttttacgccctttctgaccataaagatagaaaccccggccattttttctgcctttgcgatcgtcgttcaaaatactagaaacaacatttgcaggcgcgctaaaacgttctccataagcggcttccagtacaggaataattttagtcccggtgtcgattcctacctcatccaaaagttggattgggcctaccggaaaaccaaatttcactagcgcggcatcaatgtgctctacccgttcaccttgggtcaacatgcggatagcttcattaatgtaaggcgctaagatgcgattgacgtaaaaaccggctttgtcacgcacgacaattggcgttttaccctgttttttcgccagttttactgtggtagcgatggtttgcgcgcttgtccccgcatgaggaataatctccaccagcggcattttttccaccggactgaagaaatgcaggccgataacttgctcaggtcgcgtggcgtgagcggcgatatcaccaatcggtaaagaactcgtattgctagcaaagatggtatgagcggcgcaattttgctcaacttccgccaccatctgttgtttcaattcgagattttcaaacaccgcttcaataatcagatcgcgatgggcaaagccgcgatagtccgtcgttccggagattaatgccagctgtttgtcacgttcgctggctttgagatgacgacggcgaactttgccctccagctgatcccaactgtacttcagcgcatgatttatgccctgcgggttgatatctttaattctgaccggaatccccgctttacaagcagtgacataagcaataccgccgcccatcaagccaccacctaaaatccccacgctgtttaatggcgcaggcggcgcatcactgccgggatctttcttcacgtccgtactggcaaaaaagatactacgcagcgcctggctttgtggcgtcatcgccagttcgccaaacgcccgagcttcggcgtcataaccgctgctggtgccctgcgctaatcccgtttcaacaacctccaggatgcgttctgtcgccggataattgccttgagttttgtgttctgttttcttgccgaccattttgaacagcagcgcacgacctaacggccccgccagaatacgctcgcgtacaggtagagggcgggaagatgggcgctccttctttgccagctcaacagcggcttccagcagaatggagtgcggaacaacgtcatccaccagccccagctttaatgcctgtttcgcccgaagttgttttccggtgaggatcatctctaatgctgtgctgacgcctatcagacgcggtaaacgctgggtgccgccactaccgggtaacaatccaagttgtacttcaggcaaaccgagcaccgttttaggatcgtcagtacaaacgcgaccgtggcacgccagcgccaactccagcccaccacccaggcaagcgccatgaatagccgcgataacctgaatgggcaaagcatgaatctccgccatcaactgttggccctgccgcgccagagcttccgcttcttgcgccgttttgcagttgccgatcatgttgatgtctgcgccagcaatgaagttgtccggtttagcggagacaaacaccacgcctcgcaactctttgttttcacggagttgcttaataatggcgcgcacctggctggcaaactccgccttcagggtattcattttctcacccggtacgtcgatggtgataacggcaatgttgtccagacgaacattaagggtaaacgcacttgtcatttccattattccgcctccagaaccattgccgcgccaagcccaccggcagcacaggcggtaactaaaccaaatccaccgccgcgacggcgaagttcatgcaatgtctgggtaatcatccgcgcgccggtcgccgcgaagggatgcccgtaagcaatgctaccgccaagcacgttaaatttgctatcgtccacttcgccagtggcatgtgcacgccccagtgcttcacgagcaaaacgttcactacccagcaactgaatattcgccagcgtctgagctgcaaaggcttcgtgcatatcgatcaatgtcagatcgctcatcgtcaaaccggcacgctccagcgccagcggtgtactccaggctggaccgagcaacatgtcctgccagacatcaatcgcagtaaatgcgtagctgcgcagataccccagcggcaccagccctaattctttcgcccgggattcagtcatcaggatcaccgctgccgcgccatcggtcagcggcgtactgtttgccgccgttaccgttccgtgtttgcgatcaaacgccgggcgcagctttgcgtaatcggcaaggctggaattaccgcgaatattgttgtcttcgacaagcggttgtttataaggagggataaaggcagtcatcacctcttctttgagttttccgtcactccatgcctgagcggcacgctgatggctacggtgcgctaatgcatcttgctgttctcgggtgatgccgtaggttttcgccatttgctctgcggtgtcgcccatccgcaagccggtagaatattctgctaccgcaggtggtacgggcattaagtcgcgcaaacgcaggcgagagaagagtttcagtcgctggctcatggtacgagctttgttgacatcaaccagcacgcgcgccagttttttactgacgccaattggcaatacgctagaggaatctgccccaccggcaatccccgctcgaatagttcccgccatcaggctttctgcgacgtttgcaactgcctggaaactggtagcgcaagcgcggctgacgctgtaagcatcggtatgtacattcattcccgtaccgagaacaatttcacgcgcaatgttgggggcttcaggcatttgtacgacctgaccaaagaccagttgttcaatcacttcggcggggatctcgctgcgtgccagcagttcgcctaccaccatcttccctaaatcaaccgcgggaatgccatgaaaagccgtcgcctgacgggcaaaaggcgtacgtaaaccgctaacaatggcgatacgatcgccctggcgggtaaccagcggtaaaacctgacccataacactcccctgtaaaaaaataaataaagtggtctgacctgatcatagtcttaaccatttttttacatttagccaagtggagaaaagggaaagtgggagctatgacacagagagaaaagaagaagagaaaagaaaacgcccctgccagcaactgacaggggcgtacgtacccgagaggaattaacgcagacccagctggaaaatcagcatttcagcttcgcaggcaaaagtgaaatcgatatccaggcgcacaccgtcagactcttcagtgaaagtcggggtgattttgcaaggttcagattccacgctacgggctttttcagtcagcgccgccagcgtttgctctgcttctgcgcggtttgcaaacacgcggctgtaagacgcggtgcagtcggagttgtccataatggtgccaacatccatacagcagcaaaccggggtttcatcagcactacatttactcatcgttgatttcctctgtatgtgcacccaaggtgccagataaacgttgtggatattttacgcttccggaaagtgctgctccagttgttaattctgcaaaatcggataagtgaccgaaatcacacttaaaaatgatctaaaacaaaattcacccgaatccatgagtgcgccacctccaaattttgccagctggatcgcgtttcttagatcatatttgaaaaaagatagaaacatacttgcaacattccagctggtccgacctatactctcgccactggtctgatttctaagatgtacctcagaccctacacttcgcgctcctgttacagcacgtaacatagtttgtataaaaataaatcattgaggttatggtcatgagccagaaaaccctgtttacaaagtctgctctcgcagtcgcagtggcacttatctccacccaggcctggagcgcaggctttcagttaaacgaattttcttcctctggcctgggccgggcttatagtggggaaggcgcaattgccgatgatgcaggtaacgtcagccgtaaccccgcattgattactatgtttgaccgcccgacattttctgcgggtgcggtttatattgacccggatgtaaatatcagcggaacgtctccatctggtcgtagcctgaaagccgataacatcgcgcctacggcatgggttccgaacatgcactttgttgcaccgattaacgaccaatttggttggggcgcttctattacctctaactatggtctggctacagagtttaacgatacttatgcaggcggctctgtcgggggtacaaccgaccttgaaaccatgaacctgaacttaagcggtgcgtatcgcttaaataatgcatggagctttggtcttggtttcaacgccgtctacgctcgcgcgaaaattgaacgtttcgcaggcgatctggggcagttggttgctggccaaattatgcaatctcctgctggccaaactcagcaagggcaagcattggcagctaccgccaacggtattgacagtaataccaaaatcgctcatctgaacggtaaccagtggggctttggctggaacgccggaatcctgtatgaactggataaaaataaccgctatgcactgacctaccgttctgaagtgaaaattgacttcaaaggtaactacagcagcgatcttaatcgtgcgtttaataactacggtttgccaattcctaccgcgacaggtggcgcaacgcaaagcggttatctgacgctgaacctgcctgaaatgtgggaagtgagtggttataaccgtgttgatccacagtgggcgattcactatagcctggcttacaccagctggagtcagttccagcagctgaaagcgaccagtaccagtggcgacacgctgttccagaaacatgaaggctttaaagatgcttaccgcatcgcgttgggtaccacttattactacgatgataactggaccttccgtaccggtatcgcctttgatgacagcccagttcctgcacagaatcgttctatctccattccggaccaggaccgtttctggctgagtgcaggtacgacttacgcatttaataaagatgctagtgtcgacgttggtgtttcttatatgcacggtcagagcgtgaaaattaacgaaggcccataccagttcgagtctgaaggtaaagcctggctgttcggtactaactttaactacgcgttctgataacgcgttcgcctggataaagtcacctgcatagcaggtgactttaactcccccacttcaccgaaagtagtgtcctcattgcttacctcctgagttttgcaaacagcctgttggcagcttgccctttcaaatcaataagcggtatccacagacaaacctgaagggaaaggcatattttcaggcgttctgctcgtccttctcaaagagtttacttttctgcatttccaggatactccccccccctggctattgtgcgctcatacactcaaattaaagataggttctaaataaatgagcgttttttgatagtctatttcattaggtaatatatatttgtaacaaatcaatcaaaatggaataaaatcatgctaccatctattagtatcaacaataccagcgcagcttacccagaatccatcaatgaaaataacaatgatgaagttaatggattagtacaagagttcaaaaacctttttaatggtaaggaaggaataagcacctgtattaaacatctacttgagcttataaaaaacgccatacgagtaaacgacgatccttatagatttaatattaataattccagtgttacttatattgatattgactccaatgatacagaccatattactattggtatcgacaaccaagaaccaatagaattacctgcgaactataaagacaaagaactcgtccgtactatcattaatgacaacatagttgagaagactcatgatatcaataacaaggaaatgatcttcagcgcattaaaagaaatatatgatggagatcctggttttatcttcgataagataagtcacaaactcagacatacggtaacggaatttgatgagagcgggaaaagcgaaccaacggacttatttacctggtacggtaaagataaaaaaggcgactctctcgctattgtaattaaaaataaaaacggaaatgattacttatctctcggttactacgatcaggacgactaccacattcaaagaggaattcgtattaatggtgatagtctcacccaatattgtagtgaaaacgccaggagtgctagtgcgtggtttgaaagcagtaaagctatcatggcagaaagttttgcaactggttccgatcatcaggttgtaaacgagctcaacggggaaagactgagagaaccaaacgacgtttttaaacgttatggtcgagcaataagatatgattttcaagtggacgatgcaaaatataaatgcgaccatctaaaagaaatagtttctactttagtcggtaacaaaattaacgttggccattctcaaaaaatatataagcattttaaggatctcgaaggtaaaattgaagaaaggcttcaaaatcgccaggctgaatatcaaaatgaaattaatcaaccatctgcgccaggtgttaattttgatgatatttaaaattatttttccagttttttgatttttcaacagctgaatatcggaaatagtcagtgacgaacatcagtatttttacataattacgtctaggtcattgtcggtttatctccttttacttgtggtaattgagggataacaacaaaaaaggtgagttttgcgactcaccttttttatttgtttcttattcagaatcaatatcttttaaatcatcctgaatcgcttgtgcgttcggattttcctgcggtttgagttcgccgccattagcgatgaaatcatgacgctggaagtacgcttcgcgcaccataatataaggatcggagctctgacgcagcagaccatcggaatccagcagctgagcgcgggtttcgatcccttcaagcgtccatttacccacagacatcggccaggtcagccaggaaagaaccgggtaaaaaccatccgccatatcaccaccgtcatcacgcagcgtgaagctaccgtagaacggtaactgaacgtaaggcccataacccacgccataatgaccaagcgtactaccgaagcggtgaggttcagtccgttgcagtttcgggttcgccatccctgcaacatcaataaaaccgcccatccccaaaatggtgttcaggaaaaagcgggtaaagtggaccatcccctgataagggtcgccctgcaagaagtagttaaccatcaccgcaggttcttcaaggttgccagtaaagttgctcaaaccgttacgcgccggttgcggaacataatcacgccaggcgacagcgaccggtcgaacaatatacgggtctaatacattgaagttgaagttgtacatggtgcggttgaacccttctaacgggtcagaacgcccttgctgatctgtaccggaactcgcacaccccaccagaagcgtagttcccagagcaagcgcgctcaggcgaagcttcataaatgtctccctgtttttttatggcttatgcagtttgccatccatgacggaacgataccgtatccgcctgtttaggtgtgggcgattgtaacagcacgtcaactgatgtccagacgccctgatttgctgatttgatcatagcctggtaatcgccgccctgtaggctacttgattctatagaaacagaaaaaggcaaacgcagccttttctacattttcagagtaactcccgtcagttgcgagcaaaaaagccgctacgctttagctatacgtgctaattcaagagaagagaccatggacaacgacaaaattgatcaacacagcgacgaaattgaagttgagagcgaagaaaaagagcgcggcaaaaaaatagaaatagatgaagaccgactcccctcccgggcgatggcaattcatgagcatatccgccaggatggtgaaaaagagctggaacgcgacgcaatggcgctactgtggagtgccattgcggcgggtctgagcatgggcgctagcttactggcaaaagggatatttcaagtcgaactggaaggtgtgccgggcagcttcttgctggagaatctcggttatacctttggttttattatcgtcattatggcccgccagcaattatttaccgaaaataccgtgactgcggtactacccgtcatgcaaaaaccgacaatgagcaacgtcggcttacttatacggttatggggcgtcgtgctgctgggtaatattctcgggacaggtattgcggcgtgggcatttgaatatatgcctatcttcaatgaagaaactcgcgatgcatttgtcaaaatcggcatggatgtgatgaagaacacccccagcgagatgtttgccaacgcgatcatttccggctggctgatcgccactatggtttggatgtttcctgcagcgggtgcggcaaagattgtggtgattatattgatgacctggcttattgccctgggtgacaccacccatatcgtggtcggttctgttgaaatcctctatctggtgtttaacggtacgctgcactggagcgatttcatctggcccttcgcactacctactttagcggggaacatctgcggcggcacctttatcttcgcgttaatgagtcatgcacagattcgtaacgacatgagcaataagcgtaaagcagaagcacgccaaaaagcagaacgtgcggaaaacattaagaaaaattataaaaacccggcataaatggcgagggtttaagcaatcgagcggcagcgtacttaccccgcactccattagcgggtatactcatgccgcattgtcctcttagttaaatggatataacgagcccctcctaagggctaattgcaggttcgattcctgcaggggacaccatttatcagttcgctcccatccgtaccagtccgcaaaatcccctgaatatcaagcattccgtagatttacagttcgtcatggttcgcttcagatcgttgacagccgcactccatgacgggtaaaaagtggataaaataattttacccaccggatttttaccctagagccatacagcctcacactcgatgaggcctgtcagtttcttaaaatatcctgatctaccatcgccgtcatagagcgtatttttattacctgatttgcaggttcgattccctattcggagatagcactcatgcaacacgaactacagcctgatagtctggttgatttgaaattcatcatggctgatactggctttggtaaaaccttcatctatgaccggattaagagtggcgacctgccaaaagccaaagttatccacgggcgagcaagatggttatatcgtgaccattgtgaattcaaaaataagctcttaagccgcgccaatgggtaaaatagcgggtaaaatatttctcacatctaaaaaacaccattccaatcaatcccctgctgcttcaagtagatgtctgcaggggacaccatccttgtgtttatccctaaaaccacataaaaaccgtaaattaaattcgaactagcaggccgaataaggcacaccaggaactcgtggttttattcattaactagtggtttttacctgttctcttagccagataataaacgcttcaatttttggccactgcctgcccggtaatgtggtgatgtaataatgctgatggcatttcaccgtcatatcgccaaacggcgcgacgagctcaccactggcaagccttttttgtaccaggcgttttcttcccatcgccaccccaatatgattcatcgcggcaataacagctaaatcagaacgatcaaagccaattccagaagatgtcggcaaattaaccgcataatgttgcgcccaactatgccattcatccgtaccggagtcgttgctccatgcctgtctgtcatggagcaacgtacagtgacacaggttaattaccgtgttggttaaagcatgtctttgagcgtattccgggctacatactggcaggatttcttcatccatcagaaagtgatgagtgagttgcgcactcggcgcatcatcaaagtagatcgccaaatcgattccggcacgttgcagattgacgttgtcattaccagtgagcacggtgaggctaatagacggataccggcgtgtaaagtcacctaatgcgggcaccaaccagcattgggcgatagagggccgggaatacagagttaacgttccgcttaactcctgatttttgatatcaagaatttcctggttcagggtatccaggctgctttttagcgcccaataaacacgtttcccctcgtgcgttaattccactttgcgatgggaacgaacaaacaactgaatgcccaattcttcttccagctgattgatacggtgacttaccgcactggggctcaggctcaattcctctgccgccagggcgaaggactgatgcctggcagccacttcaaaagtatgcattttacttaattgccagccgttaagcagccgatttcttatttcacgaaggggttccataatcacctcatttttcgcttaagtgtaaaaaaatagcggcaaaatttcagctatgagatgagctaaagtgaaccatatctcaattcaccttcatttttagatgtaaatcactccattgatgcaatttacctcatgtgaaaggcaaattttatcgtttgtcagcctgcgttgtttttttgtccaatatcatcaggttaatcacaggggaaggtgagatatgcactctcaaatctgggttgtgagcacgctgcttatcagcatcgtgttaattgtactgaccatcgtgaagttcaaattccacccgtttctggcgctgttgctggccagcttcttcgtgggaacgatgatgggcatggggccactggatatggtaaatgctattgaaagtggaattggcggaacgctggggttcctcgcagcggttatcggccttggcacgatactgggaaaaatgatggaagtatccggggccgcagaaagaattggtctgacacttcaacgctgccgctggcttagtgttgatgtcattatggtgctggttggcctgatttgtggcatcacgctgtttgttgaagtgggcgtcgtgctattgattcctctggcttttagtattgccaaaaaaaccaataccagtttattaaagcttgccattccgctatgtaccgcattgatggcagtgcactgcgtggttcctccacatccggctgctttatatgttgccaataagctgggcgcagatatcggtagcgtgatcgtctacggtttgctggttgggctgatggcaagtctgatcggtggcccacttttccttaaatttctgggtcaacgactgccctttaaacctgtacccacagagtttgcagatctcaaagttcgcgatgaaaaaacactaccgagtttaggcgcaacgttattcaccatactgctacccattgcgctgatgttggttaaaacgattgccgaattgaatatggcgcgtgagagtggtttgtatatcttggttgagtttattggcaaccctatcactgccatgtttatcgccgtgtttgtcgcctattatgtgttgggtatacgccagcatatgagcatggggacgatgctcacacatacggaaaatggcttcggttctattgctaatattttgctgattatcggggccggaggcgcattcaacgccattttaaaaagcagcagtctcgctgatacgctggcagttattctctccaatatgcatatgcacccgattcttctggcctggttagtggctcttattctgcatgcggcagtgggctccgctaccgtggcaatgatgggggcaacggcaattgttgcacccatgctgccgctgtatcccgacatcagcccggaaattattgcgattgctatcggtagtggtgcaattggctgcactatcgttacggacagccttttctggctagtgaagcaatattgcggcgctacgctcaatgaaacatttaaatactatacgacagcgacatttatcgctagtgtcgtcgctctggcgggcacattcctgctgagttttatcatctaagcgcaaagagacgtactatggaaaacgctaaaatgaacagcctcatcgcccagtatccgttggtaaaggatctggttgctcttaaagaaaccacctggtttaatcctggcacgaccagtttggctgaaggtttaccttatgttggcctgaccgaacaggatgttcaggacgcccatgcgcgcttatcccgttttgcaccctatctggcaaaagcatttcctgaaactgctgccactggggggattattgaaagtgaactggttgccattccagctatgcaaaaacggctggaaaaagaatatcagcaaccgatcagcgggcaactgttactgaaaaaagatagccatttgcccatttccggctccataaaagcacgcggcgggatttatgaagtcctggcacacgcagaaaaactggctctggaagcggggttgctgacgcttgatgatgactacagcaaactgctttctccggagtttaaacagttctttagccaatacagcattgctgtgggcagtaccggaaatctggggttaagtatcggcattatgagcgcccgcattggctttaaggtgacagttcatatgtctgctgatgcccgggcatggaaaaaagcgaaactgcgcagccatggcgttacggtcgtggaatatgagcaagattatggtgttgccgtcgaggaaggacgtaaagcagcgcagtctgacccgaactgtttctttattgatgacgaaaattcccgcacgttgttccttgggtattccgtcgctggccagcgtcttaaagcgcaatttgcccagcaaggccgtatcgtcgatgctgataaccctctgtttgtctatctgccgtgtggtgttggcggtggtcctggtggcgtcgcattcgggcttaaactggcgtttggcgatcatgttcactgcttttttgccgaaccaacgcactccccttgtatgttgttaggcgtccatacaggattacacgatcagatttctgttcaggatattggtatcgacaaccttaccgcagcggatggccttgcagttggtcgcgcaagtggctttgtcgggcgggcaatggagcgtctgctggatggcttctatacccttagcgatcaaaccatgtatgacatgcttggctggctggcgcaggaagaaggtattcgtcttgaacctagcgcactggcgggtatggccggacctcagcgcgtgtgtgcaagtgtaagttaccaacagatgcacggtttcagcgcagaacaactgcgtaataccactcatctggtgtgggcgacgggaggtggaatggtgccggaagaagagatgaatcaatatctggcaaaaggccgttaataacgtttcaacgcagcatcgcaatcctttccctgggtgagcgatgctgccgatggcgcagacttaagatccccggtcttacccgctataaccccctccttttatcatcacccaacgcctttcgctgtaaacggcggtttcgcaaaccaaaccaaaaccgtaagtaagataaaagcaatagccgccatacggaaaatctcatttgcagaaatagaaagactctgctgggttatttcattattaatttcattaagaactccactaaggctaccataatatttatccataatttgactgctactattaaacacggggttaaattgatcgatggttgctgtcaactgactatggtgtaagctttcgcgtcgtccccacagcgtcattgtcaagctcgtaccaacacttccactcaaggtacgaaaaaaattactcatactgctggcattggcaaatttattatctggcaagccactaaagctaatcgttgttaagggtaaaaagaaacaggcaacggcgaatccctgaaaaaactgcggcaaaatgatgcctgtaaaatcaatcgttggcataaatgtcacagaacgccagtaatagcaaaccgcatacatcaaaaaactaaatgtcactaacaaccgcatgtctattttgttgccataacgtcctatcaaaggactaattaatagtggcatgatgccgatgggcgcataagcaagtccggcccatatcgcattataccccatcgtttcctggagtaactgcggcataaggacgatcgctccagagtaaaataaatacgcgcatgtgatactcacaataccaatggtgaagttacgggacttaaacaaactgagatcaagaatcgggttctcactggtgctctcccaaatgactaaagagatcagagaaataacacttactactgttaatattattattgtactgctgttgaaccaatccagatcgcgccctttatcaagcataatttgcaagccaccaacaccgagcactaacagggtcagtcctggtagattcattttgaccggactagtctcagtttctcttcctttaagtaaggttaagcataatgtcaggacgataatccccatagggacattgattaaaaatatccaaccccagctaaagttatcacaaatataaccgcccaatatcggcccacatatcggagcgataatcacggtcatactccataatgccagagcaaatgttcttttttctggcggataattccttaataataaactctgactcagtggaattaacggccccgccattaacccctgaacgactctaaaaaatatcagcacatcaagattggtgcttaggctacacattaaactagacaggctaaaaaaagtgacactaagtaaaaataatcttaattcgcctattctttgtgccaacctgccagtaacagggatcgcaatggcatttgctacaccaaagctggtgataacccaggtgccttcgtctgtacttgctcccagaaagccagatattgtcggtattgcgacgttagaaatagtggaatccaacatttgcataaatgtcgctaaactcaatgcaatagtgacgcaccataacgtcccaccggttaatggtgccggagtacttttagtgattgccattaaagttgtccattatggctaataatgttgctaatttctttttctatcggactggtatcgataactaaagccttactggtataagccggcatggaggtcacggtactagccagctcaggcatctcggcaatgtcttcgttcttcgtatcaatagttgctgtcatgcttaaaccaatacgcaaggggtgttccatgagttcttttggatcaagagaaacttcaaccggtacacgctgaacgattttgatccagttccctgtcgcattttgtgcaggtaataaggagaacgcattgccggttcccatattgatccctgtcacccgaccatgaaacacaacattttcaccataaagatcgctgataatattgacgctttgaccaatccgtacatccgtgagttgtgtttctttaaagttggcattaacccacatttgacgtgccggtacgacagccattaagctttgtccggggctcactgtttcgccgacctgaacacttctctgggcaatatagccggtaaccggactcttaatatccgtacgtttaagcgccaaccaggcttctttagttgcatccgccgcttcaacgacttgtggctgacggtttaatggtgtgttcattactaaagctttattcgctttataagcctggatagcggcattcaatgccgctttgctacttattaacgtatctttggtatgctccagcgtttctttactaataaccccctgcttcgctaacggcactcgacggttataatcttctaaagattgttgatactgaatacgtgcactagcgacttcggcactgtattgtttatcctgtaagtatagtttattcgtttgccgaacaatatttgccagattatttttagctttattgagtgcgatagtggcatcagttttatccagactaactaaaatgtcaccttgtcgaacgtagttcgtatctttatgattaacgacagtgacactaccactgacttgtgcagaaattggatctgcattccccgtgacataggcgtcatctgtactaatcatgtcttctaattccatactccaataggcataggcaccactaaacgcaataaataaaactaccgccaataaagaaaagtattttcttctgttagaatgttttttattactattaatctgttccactattatctctcatttctcatagatgaaatttatgaattgaatgaaaagagcattcattcttcatatcaaacacagtgcatgtgttgcacattatcccaggaacgttggaggcctaatttaaatgaggtgcaaaaaaaacaacagaggactaaaccgtggcttttgcaatacaattcttacgcctgtaggattagtaagaagacttatagtgccaacttgaaactataaatcatcggtacaatccctgattttattgttgacatttcatttatgccgactatttatatggtatacttgtcgaattatcttaaaggaagctcagattttcttatttttattgagaaaatgagatgacgccttatgtctgtattactacagggagaagggagatgcttcattgcaaagggaataatctatgaacgcaataattattgatgaccatcctcttgctatcgcagcaattcgtaatttattgatcaaaaacgatattgaaatcttagcagagttgactgaaggcggaagtgccgttcagcgggtggaaacacttaagcctgatatcgtcatcattgatgtcgatatccccggagttaacggtatccaggtgttagaaacgctgaggaagcgccaatatagcggaattattattatcgtctccgctaaaaatgaccatttttacgggaaacattgtgctgatgctggcgctaatggtttcgtgagtaaaaaagaaggcatgaacaatatcattgcggctattgaagctgcaaaaaatggctactgctatttccccttctctctcaaccggtttgttggaagtttaacgtccgaccagcaaaaactcgactccttaagcaaacaagaaattagtgtcatgcggtatattcttgatggcaaggataataatgacattgctgaaaaaatgttcatcagcaacaaaactgtcagcacttataaaagtcgcctgatggaaaaattagaatgtaaaagtctgatggatctttacacattcgcacaacgtaacaaaatcggctaaccacatgaagtttttaccctatatttttcttctctgttgtggtctttggagcaccataagtttcgcagacgaagattacatcgaatatcgtggcatcagtagtaacaaccgtgtcacacttgatccactacgtctgagcaacaaggaattacgttggttagcgagcaaaaaaaatcttgtgattgcagtacataagtcccaaacggctacgttgttgcataccgatagccagcaacgggttcgtggtattaatgctgattatttaaatcttttaaaaagagcgttaaatatcaaattaacactccgggaatacgcagatcatcaaaaagcaatggacgcgcttgcagaaggtgaagtcgatatagtgttaagtcatttagttactagcccgcctcttaataatgacattgctgcaaccaaaccattgataattacctttccggcgctggtaaccacccttcacgacagtatgcgaccgcttaccagtccaaaaccagtaaatattgctcgggtagcaaattaccccccagacgaggtaattcatcaaagttttccaaaagcaacaattatctcttttacaaatttatatcaggcattagcatccgtcagtgctgggcacaatgattactttattggtagtaacatcattaccagcagtatgatttcccgctatttcactcactccttaaatgtagtgaaatattataacagcccgcgtcaatataattttttcttgaccagaaaagaatctgtcattcttaatgaagtactcaatagatttgttgatgctttaacaaatgaagttcgctatgaagtaagtcaaaattggcttgatacaggaaacctggcctttctgaacaaaccattagaactcactgaacatgaaaaacagtggattaagcagcatcccaatttaaaggtgctggaaaatccttacagccccccctattctatgacggatgaaaatggcagcgttcggggcgttatgggggacattcttaatattattaccttgcaaacaggtttaaatttttctccgatcaccgttagtcacaatatccatgctggaacacagcttagccccggaggatgggatataatacctggcgctatttatagtgaagatcgagaaaataatgttttatttgctgaagccttcataacaacgccttacgtttttgtcatgcaaaaagcgcctgacagtgaacaaacattaaaaaaaggaatgaaagttgccattccatattattatgagctgcatagccaattaaaagagatgtatccggaggttgaatggatacaggtcgataatgccagcgctgcatttcacaaggttaaggaaggtgaacttgatgctctggtcgcgacacagctaaatagccgttacatgatcgatcattactatcctaatgaactttatcattttcttattcctggcgttccgaatgcaagccttagcttcgcttttcctcgcggagaaccggaacttaaggatattattaataaagcactgaatgcaattcccccaagcgaagttctgcgcctgacggaaaaatggattaaaatgcccaatgtgaccattgacacatgggacctatatagcgagcaattttatattgttacgacattatccgttttattagttggcagtagccttttatggggattctacctgttacgcagtgttcgtcgtcgtaaagtcattcagggtgatttagaaaaccaaataagtttccgaaaagcactcagcgattccttaccgaatccaacttatgttgtaaactggcaaggtaatgtcattagtcataatagtgcttttgaacattatttcactgcggattactacaaaaatgcaatgttaccattagaaaacagtgacagtccctttaaagatgttttttctaatgcgcatgaagtcacagcagaaacgaaagaaaatcgaacaatatacacacaggtatttgaaattgataatggcatcgagaaaagatgcattaatcactggcatacattatgcaatcttcctgcaagtgacaatgcagtatatatttgtggttggcaagatattactgaaacgcgtgatctaattaatgcactcgaggtagaaaaaaataaagcgataaaggctaccgtagcaaaaagtcagtttctggcaacgatgagtcacgaaataagaacaccaataagctctattatgggcttcctggaacttctgagcggttctggtcttagcaaggagcaacgggtggaggcgattagtcttgcctacgccaccggacaaagtctcctcggcttaattggtgaaatccttgatgtcgacaaaattgaaagcggtaactatcaacttcaaccacaatgggtcgatatccctactttagtccagaacacttgtcactctttcggtgcgattgctgcaagcaaaagcatcgcattaagttgcagcagtacgtttcctgaacattacctggttaagatcgaccctcaggcgtttaagcaggtcttaagtaatttactgagtaatgctctcaaatttaccaccgagggggcagtaaaaattacgacctccctgggtcacattgatgacaaccacgctgttatcaaaatgacgattatggattctggaagtggattaagccaggaagaacaacaacaactgtttaaacgctacagccaaacaagtgcaggtcgtcagcaaacaggttctggtttaggcttaatgatctgcaaagaattaattaaaaatatgcagggcgatttgagtttagaaagtcatccaggcataggaacaacatttacgatcacaatcccggtagaaattagccagcaagtggcgactgtcgaggcaaaagcagaacaacccatcacactacctgaaaagttgagcatattaatcgcggatgatcatccgaccaacaggctattactcaaacgccagctaaatctattaggatatgatgttgatgaagccactgatggtgtgcaagcgctacacaaagtcagtatgcaacattatgatctgcttattactgacgttaatatgccgaatatggatggttttgagttgactcgcaaactccgtgagcaaaattcttccttacccatctgggggcttacagccaacgcacaggctaacgaacgtgaaaaagggttaagttgcggcatgaacttatgtttgttcaaaccgttgaccctggatgtactgaaaacacatttaagtcagttacaccaagttgcgcatattgcacctcagtatcgccaccttgatatcgaagccctgaaaaataatacggcgaacgatctacaactgatgcaggagattctcatgactttccagcatgaaacgcataaagatctacccgctgcgtttcaagcactagaagctggcgataacagaactttccatcagtgtattcatcgcatccacggtgcggctaacatcctgaatttgcaaaagttgattaatattagccatcagttagaaataacacctgttagtgatgacagtaagcctgaaattcttcagttgctgaactctgtaaaagaacacattgcagagctggaccaggagattgctgttttctgtcagaaaaatgactaaatagcggctcccacaatgttcaaatgtgggagctatttaccagcacatcttacatttaactactgaactcctggcgaatttgttccccatgctggtcgagcgttgccgctcccggcataacatgcgggtccgcgcagccgctgatttttatcggattacccggcatcattattcccccggcttcaatcaacatatttctcgcctgagtttgtggcaatttaatggcctcagccacacttaataacggcgcgacgggtacaccaacttcatgtattctggctaaccaaacttcagctgcctgcgtttttaacgtccgctcaatatattgtttaagaatagcctggttttgtacgcgtaaaatattgctgctaaatcggggatcattaaccagttccgtaagctccagtgcctggcataacgcagaaaaaagcttgtcattaccacaacaaatcgtaatcggcttatcctgagtattgaaaacatcaaaaggtgccatgtagggatggcgatttcccagacgttgtggactcttcccagttgcgatatatgccatcagaccatgctccagaaaactcagcgtggcatcaaacatcgctatatcgacatgcgcccctctctggctcttttcgcggccataaagtgcactcactattccgctgaataaatagacaccgccgcatagatccgcaagagatgtaccaacgcgcactggcggagcatcaggatatcctgtttccatcattatcccgctcattgcctgaatgatggtatcgtaggcaggagcatcttttagcggaccggtatgtccgaaaccactgctactagcatatatgaggcgcgggttgatttcttgaagcgtttcccaactaaaccccagtttttccattgtacctgggcgaaaattctcagctaatacatcagcttgtttgagcatatttataaatatacttttatcgtgatcattctttaaatcaagaaccacactctctttgccatgattaataaaactgtaatagagactctgtccatccacatagggaccaaatgtgcgggtatcatcaccatgacccggcggctcaactttaattacccttgcgcccatattacaaagaagttgagttccgaaaggtccattaaggacatgtgtcatatcgataactaataagccttcaaacggccctttgctttcattatttgtcatttgcttatgccttgaaaaaagccgaaggtgaaaagacacttcggcatttatgtaaaatcaataacatgattaattaactaaccagtcgactgacataaatccacaagggagccgtgacgacaaagcccagtacgctcacagccaaactcgctgtaccagtacgggtgtagacattaaaccggctggcaataatgattccggagaatgccggcggtaatgcgcctgccagtaccatcatctgcagatgttcgctgttcaaatgacatgccataccaacgagaagcagtgccagtggcatcagaatcagcttcaggaaggtgttataagcaatttcggcactgaactcgaatttatgtgcagccagagtcaaccccgcagcgaataccgctaccccactgttagccttcgcaatcagattaaaggttgggtcccatgctgccggaatttttaccccaaccaacaccaggatcgttgccagaacaggtgcccatactactggctcctttgccgcagaaattaatgcgctcagattactattcttcttaccatccgctccactagaaggattcagcaaatacagaccaataggaatagtaattgcgttaacaataatagaaataattgctaccactaaacctgtacttacggaatcaccataaataggatcgagaactgcaaaccccaggaatccaatggtaggactacctgcaattaatgcacatacagctgcttctgcatgggtacgtttaaaaaatttgtagcaaccgaaccaggagaaaaagaaacatccgacaataaccacaagacttacaagggtcagacgagtgtccgcaaaaatcatttccctgtttgcccgagtaatagatacaaatagagccgcaggaagcgcgtagtttaataccagtttattaaatgcccgagcttgatcttcactaaatgtttctcgtctgccgctaaaataacccaacagcatgattacgataataggcaataaatcgccaataaaaaatgttagcataatagtatttccgataagggtcccctcaccatcgcataatgagttggcaagaggagacgatgtcagtatttaattaccagcgacttgttttgggttaagtttggtaatatggccactttcagttcctgctgcagggtcgatgaccacattaataatggtcggtttgcggctctgaataccggtggttaaagcatgacgaagttcatctgtcgtggtgacgttatagccaacgccacgaaacgcatccattaatttgtcataccttgcatggtgcaacagatccgttggacttggtgcaccagcgccactgagatcaacaccgtctcctctgtagatgccgccattattaaaaataacgatcgtcaccggcaggttatatcgacaaatcgtttcaatttccatcccactgaaaccaaaagcactatcaccttcaatggcgacaaccggagaaccagaagtcacgctagcaccgatggcatagcccataccgatgcccatgacaccccaggtaccacaatccagacgacgacgtggtttatacatatcaataatatttcgtgcattatccagggtatttgcaccttcattaactaaataaatatcctggttctcgcgcaatacgtcgcgcacagcacttaatgcattaaagtaatttaatggttgagtatctgtacttaatttttcatgcattttttgtgcattttgctgcttgtggatatttaaaatatcgcgccataccagtggagtcgtaaatgtgttttgtttcagttctgccagcataccttgcatactggatgcaatatcaccaacgactggcacagcaatggggcggttgctgtcaatttcctgcggttcaatatccagttgaataaactgtgtatctgccgcccatccttttttaccgtgtgccaataaccaattcagtcgtgcaccaacaagcatgacaacgtcagcatttgccagggcaaagctacgcgcagctgccgcagaaagtggatgcgtatcttcaaggatccctttcgccatagacattggcaggaatggaatctgagcactttcaataaattcacgaagctgttcatcagcttgactatacgccgcgcctttgccaaggataattaatggccgttcagcttttgctaaaaggctaattgcgctagtgacactcttcgggcatggcaataatgctgggctcggattttcaactttaacaatcgtggttaacgcttcgtctttttccatcgtcgcggccaggacatttgctggcaaatcaagataaactccgccagggcgaccgcttacagagacccggatagcgcgtgccaatgcaatgccaagatcctgcggctgattaacgcgaaatgctgctttggcatacggttttgccgcattcatttggtccagctcttcataatcaccttgctgtaggtcgacgatcgcgcggtcgctggagccgctaatcatgatcatcggaaaaccatttaccgttgcgttggccaatgcggtcaaaccattgaggaatcctggcgcagaaactgtcaggcagatccccggtttttgggtaagaaaaccgcttgccgcagcggcatagcctgcgctctgctcatgacgaaaaccaatataacgaatgccttccgcctgggcatggcgtgccatatccgtcacaggaatacctacaacaccataaatagtgtcaatattattctgttttaatgcttcaacgatgatatgcataccatctgtcatttgaagttgatcactcatgattaataacctcgaaatttttataaattgggagccagaagcccccgttaatatcagatggcgtggttttgcttcattgcagcaatttcatcgtcgctataacccagctcctgcaatacagcagcggtatgttcacctaatagcggcgcagctttaatatccggcgtaaaggcagagaatttcattggacaaccaacggtcagatattttccacgcaacggttgttccacttcaacaacactgccactttggcgcaaagagggatcaagactaatttctttcatacttaaaaccggtgcacaaggaatatcaaactgagtcaaataggccaccgcttcatgtttatcaatagtgacagtgtatttttcgatttcagcaaaaatatcgaaaatatgtggctgtcgtgcatgggctgtactgtatgccggatcggtaatccattctggtttgccgatggctttacaggtgttttcccagttttgctcctgaatagtgaaataaatataggcgttaggatcggtttcccagcctttacatttcaggatccagccaggctgaccgccaccacctgcattaccaccgcggggaactgcatcaccaaatgtaccattcggatactgcgggtattcttccagataacccaatttatcgagacgctgctggtcacgtaatttcacgcggcaaaggttcaatacggcatcctgcatactcatggtgactcgttgcccacgccccgttttttcgcgatgcagcaaagcagcaagtaaaccgatcagcaaatgcattccggtgttgctgtcacccaacgctgcagcgcttaccagcggcggaccatcccaaaaacccgtagtggatgccgcgccacccgctgcctgagcaacgttttcataggcttttacattcacataagggctacactcatcaaaccctttgatgctaccaaaaatcagacgtggattgatttcttgaatatgctcccaggtgaagcccatgtgatcaatggcccctggatgaaagttctcgactaagatatcagcttcgcggatcagcttttccattacctctttgccttccgctgttttggtatttaactcaatagaacgtttgttactgttaagcatggtgaagtaaagcgcatcgatatcaggaatatctcgcagctggtgacgcgttacgtcaccaacgccgggacgttcaattttaataacgtcagcgccaaaccaggccagcatttgagtacaagatgggccagattgcacaccggtgaaatcgagaactttaattccttgaagtggagtactcatagcaatacctattagttaattaaatatgtgttaatttagcgtttatttaaggcgtaatatcttctataaataacccgcaaaatatcgtcgtagctgcactcgatatttttaaaatcctgtatcaagtgctgaaaatcatttcatcgccacttccaattcctttctgcatggtaagtagtgaggacgaaaagaagaatatgataaatattgattcgtggtaatcagagagagtcgcgacatttgtgatgttattcttacaactgtaagaagcgccggtgatttacaagcaagggtatgattacgctttttaaagcgtaccataaaacataacataataaatgatttgtgatgacacgggattattgcggtttactttgaggaatataaaatgcgagtttatagcaccgcgagcgccaaataattttatgaccacaacctgtcgtattgtggtcataaaaaattgtcggctggagggagttaaatcctttacctcaatatactgcctgtcagcattagttcacaaacagtgcttcgctatcgacgatgattccatcttccgcacctttaagcgccaggtttgcctcgtagtattgctttttatcaagcagtttctgcgcatcagcaagtgcattacgagtctgtttaagtggcatcagatattggttttccattacgccaacaccggccaggcgaagctcttccattgcgccctttttatcccctttcgccattttttcattggcaatttttatcgcggcttctttttcgggagttgctacataactctcagaaattccgacagatgcattaatgacaatatattggtcatcattgagattggtctttttacctggcttagcgaactttgcccattcggtactgtcatcactcagcaaagcggaagcttcattggtcagttcttttgccttttctggatcgccatgaaacagagccaggcgcgctacctgcacgtcacgcatcgcatataaaccttgttcagagatacgctctgctgccgctgccgttttctgggtttgctgaacttgctgagtttgctgttgtgccgctaccggagcattatcagcagcccatacagtactagatgccagaattgctgtgaccatcgtggccataattaaacgtttcatacttacctcattctttaacagttttagaaaacgccgccatcatattgggtgagcatgaaatgagaaatcagagagcaacggtcattttgaaagggttatcttacagttgtagttattatcgcaagaagtattttagtcttacaattgtaggaatatgcttcctgtcgcagagaactattcttatataccacaaagagatgtcatttattatatcgatgtaaatactgattaattaaatgtaaatacagccataacatcgtaggttctcagtgaaccattttcaggataactttctatgaaagtaaacttaatacttttcagcttatttttattggtctctattatggcatgcaatgtttttgcattttccattagcggtggtggaagtgagaggagctataaagagactgaaaaaacaagtgcgatgacgaccacacactctacaaaacttcagccaagtcaggcgattttgtttaagatgagagaagatgcgccaccattaaacctcacagaagaaatgccgcccccttttccgacaaaggcgaattatcttattcatcctgtgcgataacgtctttcacatggcaggtgaacaatcatgtctgatgctgatgtgaacacctgcccaaatgagccatcctgacccattaccgcctgccataccccaccataaagcgaatcatcaagccacaagccggggcaagaaacataaatatccccgtcactagttcattaccgccagttaaccacatggtgaagtaataaatgagtgcagcgaggatcaccatgccgaagaaagaagagaccgcgcttaccacgttcagtacctgaccgatgtagccgcttacgcagacaatacacagggcgagaaacatccataaattaatcatagctcaacctcctgccgcgctaaaaaacctgtaacttcagtcactttaatagtaagacaatccttaacctctggcaatttttgctaagcatcaatgaaaacagcatgttaaatgcaagactgttgtgtacggaaaaatatttactttgcacgattaataatcagtagctgaaagcagtcagcgagtgataaagtacagataccgcattcatgctcctcgtggttatgtcctgactagtctttacactctttacaggaaccattgtcgtacatgatggcccaaccaattgagtgtaccgctgtcgacatggaatcttctgcgatacaacaattcgtatctacagaaggtaactatgtttccacaatgcaaattttcccgcgagtttctacatcctcgctactggctcacatggtttgggcttggtgtactctggctttgggtacagcttccttatcctgttctctgctttctcggcacgcgtattggcgcaatggcgcgaccattcctgaaacgtcgtgaatctatcgcccgtaaaaacctggaactttgtttcccgcagcattctgcggaagaacgcgagaagatgattgccgaaaactttcgtagtctcggcatggcgctggtagaaaccggcatggcatggttctggcccgacagtcgcgtacgtaaatggtttgatgttgaagggttggataaccttaaacgcgcacaaatgcaaaatcgcggcgtaatggttgtcggcgtccattttatgagcctggaactgggcggccgcgtgatgggactgtgccaaccaatgatggctacctatcgtccacataataatcagctgatggaatgggtgcagacccgtgggcgcatgcgctctaacaaagcgatgatcggcagaaataatctgcgcggcattgtcggtgcactgaagaaaggtgaagcggtatggtttgctcccgatcaggattatggtcgtaaaggcagctccttcgcgccgttctttgcggtggaaaatgtcgccacaaccaatggcacctatgttctctcccgtctctctggcgcagccatgttgaccgtaacgatggtaagaaaagcggattacagcggatatcgtttgttcatcaccccagagatggaaggctacccgacagatgaaaatcaagccgctgcctatatgaacaagattatcgagaaagagatcatgcgcgcaccggagcagtacctctggatccaccgtcgctttaaaacgcgcccggtgggagaaagcagcttgtacatttaacaaactgctcttactctttccctcctcaaatcggccataataacctcatggtttttatggcttttttcttaaggttttttccttcgctgaatatctaattattaccgtcagaaattaaactgtcgccgatatgagacacttgtaagttactaaaagtaaataagaaaatgcctcttgtctcgtttcagttttaggcgtacattagcgccgtctcgagcagtttagctcagaattctggggtgatgcccacggtaaaatacagggcttttaaggtcgctttgcccggtgtcaactcactgtatcaggtgtaatgaagtcattcaggcgtaacagtaattacgcggagagatgtaaagtgaaatatttctttatgggcatttcttttatggtcatcgtttgggccggtacttttgccctgatgatctaaaagcaaactgtgcaatgaaaaacaggagccatcaggctcctgtttgcatttctgacgacggtgtttattccgcgttttcgtgaatatgtttgctgctggcgggtagtaaaccgtcggcacggaacatcgctttaatccctctgatggcctgacgaatacggtcgcggttttcaatcagtgcaaagcgaacatgcgtatcaccatagtcgccaaagccaatccccgggctgacacaaaccttcgcttcgttaaggagcttcttggcaaattccaggcttcccatggccgcatatggttccgggattttcgcccagacatacatgctagccttcggcatttcaaccatccagcccgcttcatgcagccctttaaccaatacatcacggcggcgtttgtactgttcggcaatgtcgcgcacgcactgttgatcgccctccagcgccgcaatcgccgccacctgcaacggcgtaaaggtgccgtaatcgtgatagcttttaatacgagccagggcgctgaccagcgttttgttgccaaccataaagccgatacgccagcccgccatgttgtagcttttgctcagcgtaaagaactcgactgccacatcgcgtgcacccggtacctgcataatactcggcgctttccagccatcgtagacgatatcggcataggccaggtcatggaccaccagcacatcgtagcgtttcgccagcgccactactttttcgaagaactccagttccacgcattgcgcggttgggttactcgggaagccgaggatcatcatcttcggtttcggataactttcacgaatggctcgctccagttcgttgaagaaatcgacaccttccaccagcggcacactgcgtacctgcgccccggcaatcaccgcgccataaatatggatcgggtaacttggattcggcaccagcaccgtgtcaccatgatccagcgtcgccagcatcagatgcgccaggccctctttgctaccaatagtgacgatggcttcactttccgggtcgatttcaacgtcgtagcgatcctgataccagcgggaaatggcgcgacgtaaccgcggaatgccgcgactagtggagtaaccatgcgtgtccgggcgctgggccacagtacataatttttcgacgatatgcggcggagtcgcaccgtccgggttacccatgctgaaatcgataatatcttcgccgcgccgacgcgcagccattttcagttcagcggtgatgttaaaaacgtagggcgggagacgatcaatgcgcgtaaagcgacgttcagggcgagtgtcagccataatttcctcagattaacgttagcgcccggaccgtccgagcgacgctgccacgatggtggctgttttgaaaatagcctgattaatttctgtctgtccagtgttttagaacattttattaatgacgttaaatgaggaactctgctttaaaaacaggaaatttatctgcgctaacaagaaaattaccactcattttattaacataataatttcaataaatttactaaccagaagtgcattatcaagagatgcattgctaatacaccatttatctatcaatccccttttaaaattgtggtttttcctcaaaaacggcctgctggtcatcagccttcaggttacctatcatagaggtttaatccttattcagagtcacccgtgcacgaaatattcaacatgctgctggcggtcttcgatcgggcagcgttaatgcttatctgcctgttctttctcatccgtatccgcctgtttcgcgaactgttgcacaagagcgcgcactccccaaaagaattgctcgccgttaccgccattttcagcctgttcgccctgttcagcacctggtccggcgttcccgtagaaggcagcctggtgaacgtacgtattatcgcggtgatgtccggcgggattctgtttggcccgtgggtaggcatcattaccggcgtgattgcgggtattcaccggtatttaattgatatcggcggcgtgacggcgatcccctgctttatcaccagcattctggcgggttgtataagcggctggatcaacctgaaaatccccaaagcacagcgctggcgcgtcggtattctcggcggcatgttgtgtgagacgttgaccatgattctggtaattgtctgggcaccaactaccgcgttggggatcgatatcgtctctaaaatcggcattccaatgatcctcggtagcgtctgtatcggctttattgtgcttctggtgcaaagcgttgagggcgaaaaagaggccagcgccgcgcggcaggccaagctggcgctggatatcgccaacaaaacgctaccgctgtttcgccatgtcaatagcgagagtttacgcaaggtctgcgaaattatccgcgatgacattcacgccgatgcggtggcgattactaataccgatcatgtgctggcctatgttggcgtgggtgaacataactatcagaatggcgatgacttcattagcccgactacccgtcaggcgatgaattacggaaaaatcatcattaaaaacaatgatgaagcccaccgcacaccagagattcattccatgctggtgatcccattgtgggagaaaggggtcgtgaccggaacgctgaaaatttactactgccacgcgcatcagatcaccagcagtttacaggaaatggcggtcggtctgagccaaatcatctccacgcaactggaggttagtcgcgccgagcagctacgtgaaatggcaaataaggcagagcttcgcgccctgcaaagcaaaattaatccccattttctgtttaacgctctgaacgctattagtagcagtatccgtctgaatccggataccgctcgccagttgatctttaatctgagccgttatctgcgctataacattgaattaaaagacgatgagcaaatcgatatcaaaaaagagctgtatcaaattaaagactatattgccattgagcaggcccgctttggtgacaagctgacggttatctatgatattgatgaagaggtgaattgctgcattcccagcctgctgatccagccgttggtggagaacgccattgtccacggtattcagccttgcaaaggtaaaggcgttgtcaccatcagcgttgcagagtgcggaaatcgggtacgcattgcggtgcgagataccgggcacggcatcgatccaaaggtgattgagcgggtcgaagcgaatgaaatgccgggcaataaaattggcctgctgaatgtccatcatcgcgtgaagttattgtatggcgaggggctgcatatccgccgcctggagccggggacggaaattgcgttttacattcctaaccaacgcaccccagtcgccagtcaggctacgttattgctttgagccggagtgatattgtgaaagtcatcattgttgaagacgaattcctggcacaacaggaactgagctggctaattaaagagcacagccagatggagattgtcggcacctttgacgacggtctggacgtgttgaagtttttgcagcataaccgcgtcgacgccatttttctggatatcaatattccgagcctggatggcgtgttgctggcgcaaaacatcagccagttcgcccataaaccgtttattgtgttcatcaccgcgtggaaagaacatgcggtagaagcgtttgaactggaggcgtttgactacattctcaaaccgtatcaggagagtcgtattaccgggatgctgcaaaaactggaagcggcctggcaacaacagcagaccagcagtacgcctgccgcgacggtaacgcgtgagaatgacaccattaatctggtgaaagatgagcgaataatcgtcacgccaattaacgatatctattacgccgaagcgcacgagaaaatgacctttgtctatacgcggcgtgaatcctacgtaatgccgatgaacattaccgaattttgcagcaaactgccgccgagccattttttccgctgccatcgcagtttttgtgtcaatctgaacaaaatacgcgaaatcgaaccgtggtttaataacacctacattctgcgactgaaagatctggattttgaagtgccggtcagccgcagcaaagtgaaagaatttcgccagttaatgcatctttaatcgggaactttcatgaaagcaccaggcttgcccgccgatcaacaatttttcgccgatctgttcagcggcctggtgcttaacccgcaactactggggcgcgtctggtttgccagccagcctgccagcttgccggtgggcagtttatgtattgattttccccgtctggatatcgtgctgcgcggcgaatacggcaatctgctggaagcaaagcagcaacgtttggtggaaggagaaatgctgtttattccggcgcgcgcggctaatttaccggtcaacaacaaaccggtgatgctgttaagcctggtgttcgctccgacctggcttgggttaagcttttacgatagccgcaccacgagcttgttgcatcctgctcgccagatccagcttcccagcctgcaacgcggtgaaggtgaagcgatgcttaccgccctcacccatcttagccgtagcccgctggagcaaaatatcattcagccgctggtgttaagtttgctgcatctttgccgtagcgtggtgaatatgccgccgggcaatagccagccgcgcggcgattttctctatcacagcatttgtaactgggttcaggataattatgcccagccgctcacccgcgagagcgtggcgcagttttttaatatcacgcccaatcatctgagtaaactgtttgctcagcatggaacgatgcgttttatcgagtatgtgcgttgggtgcgaatggcgaaggcgaggatgattttgcagaaatatcatctgagtattcatgaagtggcacagcgttgcggttttccggatagcgactatttttgtcgcgttttccggcgtcagtttggtctgacgccgggagagtacagcgcccgttttcagggctaacgtcagaaggttaattctgtttccagcagcgtcaggatactttgtgcatcttgcgcggcaaacaagctctggcggaagtttttattcaccagtttacgcgccagctggctgaagactttcacatgattcatcccttcgttagcacccagcgtcagcatgatcaccagttcgacttcgcccatttcactctgccagccaatcggtttcgccagccgggcaatgctgatactggaatgacggatccactgagatttggtgtgcgggatcgctacgccaaaaccaacgccggtggtaacaatctcttcccgctgccagacatcttcttccagctcaaacggatgttcagtgcgcccgttaacgccgaggttgccgcacaggaactggatcgcctgctctttattgctaaaatcctgatcaacaaagatattctccagcgccagcagtgggcgaacgtcttcttccggcgtaaaggcggtgagtaacgcttcaatttcctgcgcactgcggcattcacatgcctgacgcgccagttcccgacacgcctcgctatccagttgacgaagctggcttttcaccgccggaatacgcgggctactcatactcagctcatccaggcccagcccaagcagtagcggcagataacggctttcaccgcccagttcaccgcaaatgcctacccatttgccccgctgatgcgcagtggtaactatttgctgcaacatgcgcaggaagcttggcgtaatcgggttatatagcgggcttacgcgcgggttattacgatcgaccgcatacagatactgggtcatatcgttggagccgatactgaagaaatcgacctcatcgcagaagtggtcgatgatgtagcacacgctcggaacttccaccatgatcccaagcgtaatcgtctctgcatgacgcaggccatcgcgcttaagctcaacgatcgctttttggatctcgcctttcacccataagatctgatcgaggctgtgaaccatcgggatcatcaactgggcgttgccgaaactggcggcgcgcaaaatggcccgcagttgagtgcggaacaggccagcaaattccgggtaaatacgtaccgcgcgatagccgaggaacgggttctcttcctggggaatattcagataaggaatgcttttatcgccgccgatgtccatcgtgcggaagataatcggcttgtcgcccgccgccagtagcacctgctggtaggcttcaaattgctcctgctcgtccggcgcgctgtcgcgatccatatagagcatttcggtacggaacagcccgacaccttccgcgccgttggcaaacgcgcctggcgcttccagagcggtgccgatattcgccgcaatatcaatacgcttgttatcacgggaataggccagctgcgcggcagcctgcgcctgttgtttttggcgtttatccgccagcgtctgcgcgacctgataataaccgctcaccgcgtcattcgggttaatcgccagcacgccgcactgggcgtcaagcactgcaggttgcccggcataacgggcaatcgcatccagcggcaagccactcagtaccgggatcgcgctggcacgggccagaatcagtgtatggctggtgcgcccggttttctccagaatcatgcccgcaagatttttcaaatcaaggctcaaaaactggcttggggttaaatcttcagccaccagaatggtcggtttttcaagcaccagcttgttgcgcggcttcagttccggccaggtgatatgcagcaactgttcgctgatatcgcgaatgtcgctaacacgttcgcgcagataatcgctggcagaggcagaaagtttggcgcaaacctgctccatattgctgatgatcgccgcccccagcccctgatgctgttctgtcatcaggcgacggatattgcctgcaaattcatcatcctgaatcaggctcaaatgggcgctgaggatagttttgctttcgccgtcacgctcacgcaattgctggttcagttgctcggcaagcgttgccaggctgtgctccagccgggtggaatcttgcgcactggcggggattgcccgataactgtcgaggctgtcgctttgtaacagggtcagcgtacccacgccgacgccgcttgccagcacattgccgtacagtaaatccgggttaaggcggcttaaactacgcggcagcggatgcgccgtcagttctgcctgcgtaggctgaacgctgtcgctgtcgataaagcgcacctggatgtactcttccagcacgcgccgcgcctgctcttcatcgctgccgctaatgttcaggctgcaactgtcattaaatagggtgccggtgccaatcagcgccaggctgcttttcgcatctgcctttgcgttctggcgatggttaataaaagtgatttcgctttgccactggctgcactgttctttaagttcccacgccggacgagcatgtagaccgttaggcaaaggacagagaaattgaatcgttaacataaccgctccgggttaatcaggagatcatctgaaatccgtcagttgaacaaccgtctcacgcgtaagacgttgaataagggcagataaaagttgctgcatctgcaaaatgtcgcggcaatcggcaatgcttgcggcgcaatgtccatggcgggttgctggccccatcaccactgtgggcacgccggtgccggttaagtgcaccgccccgccgtccgtgccgccgttgctgaacatatctgcctgcaacggcacgccaatttctgccgccacggtttcgacccaggcggtaagttttggcggcgcaatcaggctcttgtcgcttaacaccagcatcggcccgttaccaatctggcgatggttagccgcgccataatcaaagtttttcgcccagcaggcggtatcaagcacaatggcgacgtccgggctcaccgcgcgggtggcagtttgcccgccgcgtaatcccacctcttcgctggaacttgccaccagccacacttccgcaggtagttcggcgtcgtgcagttcgcgcagtaacgtcaccagcagatagcaaccgaggcggtcatcaaaggctttccccatcactcgctggtgagggagaacctgaaaagtggtatcaaacgtgacgcgatcgccgggacgaattcccgcctgcatcacttcgtcataggagcgcgcaccaatgtccacgcgcatggcgctgacgtcattcccctgccggtcgccgtcaagcaggcctggaattttgcactcttcacgggtggtgatgcgcaccggctgcagctggcgggcagccatgcgtacgttgccaaccggcagcacatcaatcgccccttcgcgggagatgctgcgcaccataaatcccacttcgtccatatgcgcacagatcatcaccttcggacctgtgctttcattcaggcggatcagcacgcttcccagaccatcaaatcgcacttctttttgcaggcgatccgcttcttccagcaggatctgccgcacttcctgttcgctggaggcgatcgcatctgcctcgctcaacgcttttaataggcttaaatccattatgcctctcccgtgagcaacactgttttcggcatggcgtagagcacttctgcgccttgcggggtaaccagcacaacatcttcgatgcgcacgcccccttgccctggcaaataaatccccggctccacggtcagtaacatgcctggctgtagcgtcgtggtgtcccgcggactaaaacgcggatcttcatgaacttcaatgccgatagcgtgaccggtgttatgaccgaaatagtcgccataacctgcttctgtaatgacccggcgcgcggcatcgtcaacctgctggcagcgcacgccggggcgaatcgcggagattgctgcgagctgtgcctgcaggacaatttgatagacgttaaacagcaggtgagattcggcgctcaccccttcgccattcaccagcaaggtgcgcgtcatatcagagcagtagccctgatacagcgcaccgaaatcgagagtgacaaactcgcccgctgcaacaatcttgtcgctggctttgccgtgcggcagcgccccacgccagccactggcgacaatggtgtcaaaagaggctttttctgcgccctgctggcgcataaaccactccagttcagcggctatctcgcgctcgctcatccccgcctgaataaagcggcgaatatgctctgcaccgcgatcagcaatcccacaggcgaggcggattttctccacctcctctggcgttttgatttgccgcagcacatccggcgtggcgctaaccagtttcgcattgagttcagactgccagcggtgcgcggtttcccaactcacctgctggccctcaaaaccgagcgtttgcaactgttcatcggcaatgatttgattgacgatagtggtaagcgtgttcgtcgcgtcaagcaaatgcagctggtagccttgcgcacgggcttccacctcaacgtaatagcggctatccaccagaatgtgcgcactttcacggctaatcaccacataaccacttccggtggagatccccagatgcggctgtttgttctgccgactggagagaagcactgcatccagttgttgcgccttaagccagtcgcgcaggctagcgagtaatgtcatctggattttccttcttacaggctatcgattaacaatttgcctttacggaacatcatcagacgcaggaacaccaccatcagcgcagttatgactgcccccagcgcgatccccgccatatagacgcccaggttagtgaccagcggccatgcccagatagcggactccgggaaccattgcactgcgcccagccagacagcggcggtactgccgacaatagcgccgaccatatagctcggaatggcggtgatggggctttccagcgcaaacggaatcgcaccctcactgatccccataaacgccaggaacatggcggtcttaccctgcggataaagttgagcgttgaacaggcgtttgccggttaaacgacggtcgataatggtcgccagccccagaccaatcggcggaataacgatagcgatagaacgagcggtgaccggtaatacgtggtcagtggtaaagctgaaggcaacaaaacctgcggctttgttgatcgggccaccaaggtcgattgctgtcgccgcggcgatccccattgcgtacatcagcgcgcccttctcacctgcggcagtcagcacagtacggataccgccgttgatccagccaccaaagggggtgatgacgtagtacatcgccagcatgacaaaaatggcggaaagaatcgggagcaaaaatgtggttttgaacgctaacaggaaatccggtaactggattttctggttcatccacttcacaaggtaaccggcaacgatagaaataatcagcgcaccaatgaaggtggacggcaccgggctagaggtcgcccattgcatagtgctgggatcgaagttcagcagttgcgtcggctgggtagacatcaacccgccgataaaaccagccgggaacgccagtttgccaccgatagagttcgccacaaaagcagcaaacatcggaatggcaaaaccaaacaacacgccgccgaaggactggctcagccaggcaaatttaagtaaggagaggtcgaaaccggagaatttcccgctattaagagcatccatgatgccgatctcagcaggaattttaagccagctataagcaatcagctggctgaaagcgaggatcacaccgcccataattaaggtcggcaccatgcgactaatcccactcatcacatgctgcgggagttcaccccagaagctggttttagaggcctgcggattcttaactgccgctgccgcaccggatgcgccaggcacaacggttgcactgcgttttttaatggccataacaattatccctgtcgaatattactgttgttcagaggcaatcatctcttcgatttctttgatgatgcccgcagcgtttttaattgcgtcctgcaaagtgatttcataaacgtcgcgactttcgaaacgttcgttatcttccggggtaactgccacggagtggatgatgatggtcgcttcggcgatatcctgcgccgtcaggcgattctggataccgtccgcgccctgggtttcaattttcacttcataaccggcttctaccgccgcttcttccagcgcctgagcggccataaaggtgtgagccaggcccatcgggcaggcacataaggcaatcagtttcttactcatcgttaattcctcgttcagtgatagttgacgagtgaaattatgaacgtgcaaaacaaatcgccgttaccagacaaataatgcatttactggagaattaatcccgctgtacggaagtgtgacgcaggtcgaccttgtgaggggacacaaagaaaaattgaataaactgtatgatttaaaagattatcgggagagttacctcccgatataaaaggaaggatttacagaatgtgacctaaggtctggcgtaaatgtgcaccggaaccgagaaggcccggattgtcatggacgatgagatacaccggaatatcatggacatattctttaaagcgccctttatcttcaaatgcggcacggaaaccggaggctttgaagaactcaaggaagcgcggcacgataccgcccgcaataaacacgccgccaaatgtcccgagattgagcgccagattgccgccaaaacggcccataatgacgcaaaacaggctcaatgcgcggcggcaatcggtgcagctgtcagccagcgcgcgttcggtaatatcttttggcttgagattttctggcaggcggttgtcagctttcacaattgcgcgatacaaattcaccagcccagggccagaaagcacgcgctccgcgctaacatgaccaatttccgcacgcaatatttcgaggataatggcctcttcttcactattcggcgcaaaatcaacgtgaccgccttcgcctggcaagcttacccaacgcttatcgacatggaccagatgcgcaaccccaagccccgttccggcaccgtaaaccgcaataggcttaccttcgaccggttctgcgccaccaaactgaatcagatgctcttttttcagcatcgggatcgccatgcttacagcggtaaaatcgttaataatttccagatggctaaaaccgagattctttttcatttcggcaatactgaacgcccaggtatggttggtcatcgccacccagtcaccggtaattgggcaagcgatggcaatacagccgtctttcacctcgaccttatgttcttcaagataaacgcgaatgaccgcttcgaggctggggtaatcaagcccactataggtcttagcctggctgatttcaccactggcaatatcacacagagcaagacgtgcgttggtgccgcccacatcaccgactaatgcatactttgtcattcttcaactgctccgctaaagtcaaaataattctttctcacactgtaaatacctgggggcataacaacaacgccggaaaggcaggctccctgtaaatatcgatctgggtcacacaattactttatcgtttcagcaccaattgcagcgatgcctttttgcaagctgggcaaactaagtatctgaccccgcataaggaatagaacacaggcggcactaacccggacgtagactgtattacaaaagcggcaaaaagcagagacaaaaaacccccgctttgcagcgagggttggaaatttggtggagctaagcgggatcgaaccgctgacctcttgcatgccatgcaagcgctctcccagctgagctatagccccacgatgcgtttacgtaccaagtttgctgggtgcaaaatttggtggagctaagcgggatcgaaccgctgacctcttgcatgccatgcaagcgctctcccagctgagctatagccccgtcacgtaaagcttgtcgagttgacgggcggcatcatatgaattccgcccgaatgtgtcaacggcaaattgcaacgtgtagtttcaatcgctgaaaaatcaggcaaatgaacaattttggaaaaccgctcgcattcagtagttattcatgtcacggtttcctgtaaagtggtgttataaaatgaactactaatagacccacatacattcagggaattgttatgttcaaggagaggatgacaccagatgaacttgccagactgaccggctatagccgccagaccattaataaatgggtacgcaaggaaggctggacaacgagtccaaaacctggcgtccagggtggcaaagcccgactggttcacgtcaatgaacaggttcgtgaatatattcgcaatgctgaacgtccagaaggtcagggagaagcgcctgccctttctggtgatgcgccgcttgaagtattgctggtgacactggcgaaagagatgacgccagttgaacaaaaacagtttacatccttgcttctgcgggaagggattatcggattgttacaacgcttagggattcgcgatagcaaataatatgaaaagattacgcaataaaatgaccaccgaagaactggctgaatgcctcggtgtggctaaacaaactgttaaccgttggatcagagaaaaaggctggaaaacggaaaaatttcccggcgtgaaaggcggtcgtgccagacttattctggtcgatacgcaagtttgcgagtttattcagaacacgccagccttccataacacaccaatgttgatggaagctgaagagagaattgctgaatacgctcctggagcacgcgccccggcgtatcgacaaatcatcaacgcgatagataatatgacagacattgagcaggaaaaagtcgcgcaatttttgagtcgtgaaggaattcgcaatttcctcgcccgtctcgatattgacgaaagtgcataaataaaaaacggcaggatattatctcctgccgtttatctttttacacgctaattactgctgattttcgcgttcagcaataaaatccagcgctttgttgatacgctcgatactgcgggtcttaccaattgcgtgaacggtaacatccagtgctggagactgccccgcaccggttacggcgacacgcagcggcataccaactttacccatacccacttccagctcatccgccgtcgcctgaatagcgtgatgaacgttttcagcggtccagtcagtaatcgcggccagtttgtcacgaaccacttccagcggctgacgcgctaccggacgcagatgttttttcgcggcgtcggcatcgaactcagcaaaatcttcgtagaaataacggcagctctgtgccatctctttcagcgtcttgcagcgttcgcccagcagtttcaccagatcagccagctgcgggccgttacgggtatcgatattttcctgctcaatgtgccactgtaagtgagtagcaacatactccggcggcagcgcgttaatgtagtgatggttcagccacagcagcttgtcggtgttgaacgcactggcagatttgctgacggcattcaaagtgaagtatttgatcatctcttcacgagtgaagatttcctgatcgccgtgggaccagcccagacgcaccagatagttcagcagtgcttctggcaaataaccgtcatcacgatactgcattacgctgactgccccgtgacgtttggacagttttttaccgtcatcgccattgatcatagaaacgtgcgcgtaaaccggcaccggcgctttcagggccttaagaatgttgatctggcgtggcgtgttgttgatatggtcttcgccacggataacgtgggtgatttccatatcccagtcatcgacaaccacacagaagttataggttggggaaccatcggtacggcggataataagatcgtccagttcctggttgctgaactcgatcggaccacggatctgatcgtcaaaaacaacagaaccttcctgcgggttagcaaaacgtacaacacacggttcatcatcagcatgatgctcatggctgtggcggcagcgaccgtcataacgcggcttctcacctttcgccatttgctcttcgcgcagcgcttccaggcgctctttagagcaatagcatttataagcagtgccctcttccagcatctgatcgatcaccgcgttgtagcgatcaaaacgtttggtctggtagtacggaccttcatcccactccaggctcagccagttcatgccatccataatggcttcgatagcttccggcgtggaacgctcaagatcggtgtcttcaatacgcagcacgaactcaccgccgtggttacgtgcaaaaagccaggagtaaagagcagtacgcgcgccgccaacgtgcagatagcctgttgggcttggcgcgaagcgagttttgattttcatgaaatggccttacgtttagaaagatgccgacaaccggcaaatcctggaaaaattaagtgggcgatattctatcactcccgcctgattcctcaatgtagttcgggtttctaccttacgcattattgttttcgttgacaaattgcgcaacacggtctgttttgcgatcatcttgcttaaatttacgacgaacgaacaatttctttagaaaatgcgttgactcattttgaactctccctataatgcgactccacacagcgggggtgattagctcagctgggagagcacctcccttacaaggagggggtcggcggttcgatcccgtcatcacccaccaactactttatgtagtctccgccgtgtagcaagaaattgagaagtgggtgattagctcagctgggagagcacctcccttacaaggagggggtcggcggttcgatcccgtcatcacccaccactttctcgccagctaaatttcttgtaaaaatgtgaagtaccgaagtgggtgattagctcagctgggagagcacctcccttacaaggagggggtcggcggttcgatcccgtcatcacccaccacttcgggtcgttagctcagttggtagagcagttgacttttaatcaattggtcgcaggttcgaatcctgcacgacccaccaatgtaaaaaagcgccctaaaggcgcttttttactatctgcgatactcaaagattcgaacctgcagcaggtttgagttgagcgcagcgaaacaacggagccgctcgtgctggcgacggcccgaagggcgagcgaagcgagtcatcctgcacgacccaccaatgtaaaaaagcgccctaaaggcgcttttttgctatctgcgatttgcgaaattgcctgatgcgcttcacttagcagactactatttccggcaattcctgtctcctcacttactgtgtcaatgcagccaacagcttaaccatcgcgggcgtcacctgctgtgtttcataaacaatatataaatctgcagggatgcgctgtttgagcggacggaaaatgacacctggccagttcatttgtgcgtagctgtccgctatcaatgtgataccaatgcccatactgaccatagcgagtaccgtttgcggttcattaacttcgcgaataacaaccggactaaatcccacctgctggcaaactcgctgcaaaaaatcccagtcagtgtaaacgggcggcattgtaacaaaatactcgtcacgtagcgcttccagcgggacggtggaaaaactactgagatgatgctcttcaggcatcgccaccagaaacgcgctttcatgcaaccgtaagctggtaaaaccagtcggtggttctgtcgccattcgccagatcccggcatcaagttcgcggcgttccagcaaggccatttgcatcgcgggcatcttttcgcgaaaaagaacgtcaacgttaggattttccctgaggaatcgccgcataaccgggcgcatccgtccccacattgccgttcccactacgccgagttcaatccgccctgcttctccccgacctatttgttcaatccgagccaatacattattagcattcaccagcaatcgacggctttcttccatcaagattttgcccgcgtgtgtcagtacgacgctgcggctatggcgaataaaaagctgcgtgccgagttgattttccagctctttaatatgaatgctgagcggaggctgagacatatttaaacgcgctgctgcgcggccaaaatgcaactcttccgctacggcaagaaaataacggagcaacttaagatctgttctgtatacgcgttccataattaagtgctccatataataaatacatcgtattaaattatcatggcataaagtatttcaccaccagatatccgacatacataaacacaatggataatatacccggtaatacatttggtacaggaataggcaagcgcacgattgtaaacaaagcaccaataccaaaaccaacgccggaagaaaataaaatatctttcactaattaacctttatcataaaagcagctctgaagagcagagccgcgaatccttttaatgagtcaccgctcgatgctttatcttttcagggtcatgattatatttaaacccaaagaaaaatatcactgcgagaaaaagagcatatcctgcaaacaccagccagatagtttgccagtcttttacgccatccacgctaaagtaatctactgccatgccactcagaatgctgccaacccatgcgccgacaccatttaccatggtcataaagagcccctgcgcgctggcacgaatgctggaatcaacttcctgttcgacaaatacgctaccagaaatattgaagaaatcgaatgcacagccataaacaatcatgctcagcagcagcaaaataaatccggttgtactcggatcgccataggcgaagaagccaaagcgcagcgtccaggccaccatactcatcagcatgacggttttaatgccaaatcgctttaaaaagaatgggatagtcagtataaagcccacttctgccatctgactaacactcagtaaaatggagggatatttcaccacaaaactgtcagcaaactccgggttacgggcgaaatcatgtaggaacggattaccaaaaacgttggtaatttgcagtaccgcacccagcatcatggcaaagaggaaaaagatggccatgcgtggatttttaaacagcacgaaggcatccagacccagcttgctggcaaggcttgtggtcgcttttttctccgcaaccggaatcttcggcaaagtcagcgcataagcgctcagcagcaaactcgcaccggacgcgatatacagctgcagactactcaattccagatgcagcaggcttactgcccacatcgcgacaatgaaccccaccgtaccaaaaacgcgaatgggcgggaaagcggtcaccgggtcaagccctgcctgggcaagacaggaataagagacgctgttgcttaacgcaatagtcggcataaacgccatcgcattgactaacatcacccaaaacatcatatccggatcagttacggatgccgcataaaaaagtacgcccgcacacaccaggtgacacagcatgtatgcacgttctgcgcgcagccatttgtctgcgatgatccccattataccaggcataataatcgcggcgatccctttggaactgtaaaccatgccaacattagcgccggtgaaatgaagagtattaatcatgtaagagccgagggtaaccagccagctcccccagataaaatattgcaaaaaggacattacctttaagcgcatcgcgatgctcataatcgtttccttgtcgcatcatttggcctcacccgcgaggccgtttcttattgtttttctcaggcaattttgcgcagaaagccacaaataaggttgatgaagttctgcttagagagctccgcagccgccagcgtttgcgcatgactcaatttcacatcgcttaaaccttccgccatattggtaatcgcagagaccgcaacgactttaaggtcgcaatggcgagcactaataacctcaggcaccacagacataccaacaacatccccaccaataatttgcatcatgcgaatttccgccgcagtctcgaaattcggccccggatagctgacgaacacgccctccgtcagagggaaaccctcttctttcgccactttttgtaacagtgcgcggtattccgcatcgtaggcatttgccagactgaagaagcgctctccaaaacgatcatcgttaagacccaccatcggcgtaccgggcatggtgttgatatgatctttcaatgcgaccaggctgcctgcccccacttccggacgcaggctgcctgccgcattggtgcagaacagtagctcgcagcccagcagcttaaaggtacgaattgcgtcagtcataatggtcattccacgaccttcgtagaaatgtccgcgacctttcatacataccaccggtacgccctggagatggcccagcactaactcccccgcatgaccatgtaccgtacttaccgggaagcccggcagcttttcgtaggaaattgcgacagcgttctcaatctgatcggccagcgcgccgagcccggaacctaaaataaaggccactcgtggcgtgaaatcaggtttataagtcttgataatatctatgcaaaacagcgggttatgagaaaattgaacctgagacatacatatcctttttctgtagggtggaatctaacgcctttttatagcgaggttgtcccggctcttaccaatacacttttctcacgcattcaatagcgattcgatatcgatggatttatatcttttctctattaatccacggtaaaaactgtattggcgatattaattcctttgcattaacaatatgtcgtttttagcaaaccactttattaagcaatctactaataacgatcggcatagggaattatgctatgaaaaaacatcttttaactctgacactttcctctatattagcgatacctgttgtatctcatgcagaatttaaaggcggttttgcagatatcggcgtgcattatctggactggaccagccggactaccgaaaaaagcagcaccaaaagtcacaaagatgattttggttatcttgaatttgaaggtggcgctaactttagttggggagaaatgtacgggttcttcgactgggaaaacttctataacggtcgccataataaaccaggtagcgagcagcgttatacctttaaaaataccaaccgtatttacctgggtgacaccggatttaatctctacttgcatgcgtatggcacctacggttctgcgaatcgcgtgaatttccacgacgatatgttcctgtacggtatcggctacaatttcaccggcagcggttggtggttcaaaccgttctttgctaagcgttatacagatcaaacctattacactggcgacaacggctatgtcgccggctgggttgcaggttacaactttatgctgggcagcgagaaattcactcttaccaactggaacgagtacgagtttgaccgtgacgctacctatgcagcgggtaatggcggtaaagaagggctgaatggcgcagttgcactgtggtggaatgcaacaagtcacattactacggggattcagtatcgatatgcggatgacaaactgggcgaagatttttaccaggatgcgataatctactccatcaaatttaacttctgattgattactgccggggctcccggcagtatgaattcactttatatctgatacaacggatccccttcccgcccagccattagcgcattgccctggtctcgtaccacgtcccataaagcttcagcggcggtggaaagactacggttcttcctgcgcaccagcatcaactggcgttcaacaaccggcgtaatgcgctttaccaccagtgggctaccttcaggcaatggtagcgccagtgcgggaagaatactgatgccgatgcctgcggctaccatcgggaacagcgtcgccggatgtccaatctcctgcacaatattcgcctgaataccattgcgcgccagcgctgcgtcaatcagcggtcggctgccactcgcgtaatcctgcaacaccaatttcgctccctgtaatgcctgccagggtacataatcttccacggccaaagcgctatcgcgatggcaaagcagaaagaaaggctcggaaagaatcgcttcacattgcagatcgcccactgggcctggatcgatgacgatgccaaaatcgacatctccctggcgaatactttccattacccactgctgcggacgatcgtgcaggacaaactgaatatctggatagcggcgatggctttcagcaatgcattgcggaataagatgcgcggaaatggtctggctggcagcgacccgaacttttccgctcagttgttgccccatacgcccggtatcgcgcaacgtgctgttcagttcatccagcagtcgctcaagacgcaaagccagctgctgccctgcatctgtaagcaccacttcacgcgtggttctgtccagcaggcgaacaccagtatgattttccagttccttcacactgtgactcactgcgctctggctcaggccgatacgctctcctgcacgactaaaacttttctcctgcgctactgtgacgaaaacctttaattgttttaaagaataattcatctgttttcttcatgaatggatgcaataaatcaattttatttctcaaactggaagaagcacaatagaaccatcgatcatctggagtctttatgaaactttttcgtatcctcgatcctttcaccttaaccctgatcacggtggtgttgctggcctctttctttccggccagaggcgatttcgtccccttctttgaaaatctgaccaccgcagctattgccctgctgttctttatgcacggcgcgaagttgagccgtgaggcgattattgctggcggtggtcactggcgactgcatttgtgggtaatgtgcagcaccttcgtgctgtttccgattctgggtgtactgtttgcctggtggaaaccggtaaatgtcgacccgatgctctactccggttttctctacttgtgcattctcccggctaccgtgcagtctgcaatcgccttcacgagtatggcgggcggtaacgtcgcggcagcggtttgttctgcgagcgcatccagcctgctggggattttccttagtccattgctggttggtctggtgatgaatgttcacggtgcagggggcagccttgagcaggtcggtaaaattatgctgcaactgctgctgccgtttgtgttggggcatctttcccggccgtggattggtgactgggtgagccgcaataaaaaatggattgcgaaaactgaccagacgtccattctgttggtggtttatacagcgttcagcgaagccgtcgttaatggtatctggcataaagttggctggggaagtttgctgtttatcgtggtggtcagctgcgttcttctggctatcgtgattgtagttaacgtctttatggcacgccgactgagcttcaataaggcagatgaaattactatcgtcttttgtggtagcaaaaagagtctggcaaatggcatcccgatggcaaacattctgttccccacaagcgtgatcggtatgatggtgctgcccctgatgattttccatcagatccaattgatggtctgtgcggtgctggcgcgtcgatacaaacgccagaccgaacagttacaggcgcagcaggaaagcagcgccgataaagcttaaagcggacgcttcaggggctggaccagttgcgtcagcccctcggttttaatcagcagcgtgatttgcattagctcaccgagcttccctgccgggaactcatctttgcgggcaaaccacagcagatactcctccggcaggtcgattaagcgacgccctttgtatttgccaaacggcattatcgtattggctatttcaatcagctgctctttttccatctcagctacccagcaaacgcagcatttccgcttcgtcgatgacttcaatgcccagttcctgcgccttcgccagtttagatcctgcagcttcacccgctatcaccagatcggttttcttgctcacgctgcccgcgactttcgcgcccagttcgaccagtcgagctttagcgtcatcacggctcatctggcttaagctgcccgtaagcaccacggttttaccagcaaacgggctgtcaatctcttccgcgttgataacgatcggcgcaggccagtgaacaccttccgccaacagctcgctgatgacattgcggttgctttcttcggcaaagaagttgtgaacgtgggatgcaacgacaatgccaacatcaggcaccttttgcagctcttcaatgctagcggcttccagcgcttccagcgtgccgaaatatgccgccagacctgctgcggtggcctcgccgacttcacggatgccaagtgcatagaggaagcgagcaaaggtggtttctttcgctttttccagcgcgttaaccacgttttgtgcgctttttggccccatacgctccagtccggtcagtttgcctgcggtgagtttgaacagatctgccggagtatggacatattctttttcaaccagctgatcgatgattttgtcgcccattccgtcaacatccatcgcacggcgggaaacaaagtgtttcaggctctctttacgctgcgcaccgcaaatcaggccaccggtacagcgggcaaccgcttcaccttccacacgctcaacgtcagaaccacataccggacaatgcgtcgggaatacaacctcacgggtatcttccgggcgttcagaaagcacgacgttaaccacctgcgggatcacgtcgccagcgcggcgaatcaccactttatcgccaatgcgtaaaccaagacgttcgatttcatccgcattgtgtaaggttgcgttactcaccagcacgcctgcaacatggacaggttccagacgcgcaacaggcgtaatcgcgccagtacgcccaacctgaaactcgacgtcacgcacaaaggtcatctgctcctgcgccgggaatttaaacgctaccgcccagcgcggggcacgcgcgacaaagccaagctgctcctgctgtgccagactgttgaccttaatcaccacgccgtcgatatcaaagcccagcgtcgggcggtcttcttccactttgtgatagaacgccagcacttcttccgcgctttcacaaagcgttacccgatcgctgaccggcaacccccactttttaaattgcagtaaacggccaagatgagtatccggcagctcgccaccttccagaacaccaacgccatagcagaaaaaagtgagcggtcgcttcgctgtaatacgcggatcaagctgacgcagactaccagctgccgcattacgtgggttagcaaacactttcccgcccgtgcgtcgcgcatcttcgttaatcttttcgaaccccgcctgcggcaggaacacttcaccacgcacttccagacgcgccgggatattctctccgtgcagcttcagcggaatggcgcgaatagtacgcacattagacgtgatatcttccccggtggtgccatcgccacgggtcgcggcactgactaaaacgccattttcatacagaatactgacggcaagaccatccagcttcagctcacagcaccaggtgactttctcgttgtttttcagacggtcctgcacacgtttgttgaaagcaagaaagctttcttcatcaaaaacgttatccagactcagcattggtacttcatggcgtatctggctgaaagccgccagcggcgcagcgcctacacgttgagtagggctatcaggcgtaatcagttctggatgtttggtttccagctcgcgcagttcgcgcatcagcctgtcgtattcagcgtcgggaatttccggcgcatccatcacatgataaagatattcatgatggcgaagcgtcgttcgcagttctgtcagttgttgttcgatactttccatatcgcaccatcaatgctaaaaacccccgacaagcgggggttcgaagaggagttaatttgccttaagtgtatcaggcgttggcgtctttgacttcgcggatgatgtcctggtactcgcgcaatttctgcggagtcatcatacggcgctgatcgtcaagcacgacaccgcccacttcatcggcaatatgctgcgcagattgcagcatcagcttgaagttctgcagctcgtcaccgtaagacggtacctgcataaagatagtgacacccggagtagtgaaatccttcatttcaggatcaaaggttcccggtttcaccatattcgccaggctgaataacgccgggccgctgccatccgggctaagatgacgatggtaaatattcatatcgccaaaaatgaagcccgcttgttgaatgctgttaagaagcagttcaccgtttagctcgctaccgtgatgcgccgcgacgttcatgataatcaccgcttctttgcgcttcggtttatccataactggagcaggttccgctacaggctcaggctgtggtgccgctacgggttctgcaggctggaaagcctgttgtgccggttgcggtgcactatgcacaggctgcggcgctggcgcgacctgtgggctaactggctgctgcaacggctgttcaggctgcggctgataggcaggctgctgcaccggctgcgctggatgcggagcatgttgcggcggtacctgcgcttcaggcggctgctggaccggttgacgcggctgcgcagacgcataaggcggttggtactggtgttgcgggctcggacgagcagcctcatgctcctgagcgttagccggggcatgattcacgcggtgaacacgaacctcaccaacgccctcatcatcttcgacatcctcgtcataagaatcgtcgtcacgtttactcttcattcgttttaatggccgatcgcggaacatagaagatcgttctttacggctggtccagaaaccatgtaccagtaaagcgattatggcgatcgcgccaacaatgattaatatcagacgcaaatcctgcatcattatattctctgttgttctaacaccttgccaccacggcaaacatttactcactaagagtatttgccgattacctcaagtgcaagtgcactattaactttcacagcacaaagatagatgaaatcgtgctttttgctgttttttcgaacatatcctaactgtccattgcgcaattacccggtaaaatacgcagaattttcctgggattggtcaaaaggagctcatcctgattatggttagtagtttcacatctgccccacgcagcggtttttactattttgcgcaaggctggaagctcgtcagccaacctgggattcggcgtttcgttattttaccgctgctggtcaatattttgttgatggggggcgcattctggtggctctttacacagctcgatgtctggatcccgactctcatgagttacgttccggactggctacaatggctgagttatctgttgtggcctctggctgtcatctctgtgctgttagtgtttggctatttcttctccacgattgctaactggattgccgctccgtttaacggtttattggctgaacaactggaagcacgattgactggcgctacaccgccagataccgggattttcggtatcatgaaagatgtgccgcgaatcatgaaacgcgaatggcaaaaatttgcctggtatctgccgcgcgcaattgtattactaattctttacttcatccctggtattgggcaaaccgtcgcgccggtactgtggttcctgtttagcgcctggatgttagccatccagtattgcgattaccccttcgataaccacaaagtgccgtttaaagagatgcgcaccgccctgcgcacacgcaaaatcaccaatatgcagtttggtgctttaaccagcctgtttacgatgatcccgctgcttaatctgttcatcatgcccgttgccgtttgtggcgcgacggcgatgtgggtcgattgctatcgcgataaacacgcgatgtggcggtaacaatctaccggttattttgtaaaccgtttgtgtgaaacaggggtggcttatgccgccccttattccatcttgcatgtcattatttcccttctgtatatagatatgctaaatccttacttccgcatattctctgagcgggtatgctacctgttgtatcccaatttcatacagttaaggacaggccatgagtaagatttttgaagataacagcctgactatcggtcacacgccgctggttcgcctgaatcgcatcggtaacggacgcattctggcgaaggtggaatctcgtaaccccagcttcagcgttaagtgccgtatcggtgccaacatgatttgggatgccgaaaagcgcggcgtgctgaaaccaggcgttgaactggttgaaccgaccagcggtaataccgggattgcactggcctatgtagctgccgctcgcggttacaaactcaccctgaccatgccagaaaccatgagtattgaacgccgcaagctgctgaaagcgttaggtgcaaacctggtgctgacggaaggtgctaaaggcatgaaaggcgcaatccaaaaagcagaagaaattgtcgccagcaatccagagaaatacctgctgctgcaacaattcagcaatccggcaaaccctgaaattcacgaaaagaccaccggtccggagatatgggaagataccgacggtcaggttgatgtatttattgctggcgttgggactggcggtacgctgactggcgtcagccgctacattaaaggcaccaaaggcaagaccgatcttatctctgtcgccgttgagccaaccgattctccagttatcgcccaggcgctggcaggtgaagagattaaacctggcccgcataaaattcagggtattggcgctggttttatcccggctaacctcgatctcaagctggtcgataaagtcattggcatcaccaatgaagaagcgatttctaccgcgcgtcgtctgatggaagaagaaggtattcttgcaggtatctcttctggagcagctgttgccgcggcgttgaaactacaagaagatgaaagctttaccaacaagaatattgtggttattctaccaagtagcggtgagcgttatttaagcaccgcattgtttgccgatctcttcactgagaaagaattgcaacagtaatgccagcttgttaaaaatgcgtaaaaaagcacctttttaggtgcttttttgtggcctgcttcaaactttcgcccctcctggcattgattcagcctgtcggaactggtatttaaccagactaattattttgatgcgcgaaattaatcgttacaggaaaagccaaagctgaatcgattttatgatttggttcaattcttcctttagcggcataatgtttaatgacgtacgaaacgtcagcggtcaacacccgccagcaatggactgtattgcgctcttcgtgcgtcgcgtctgttaaaaactggcgctaacaatacaggctaaagtcgaaccgccaggctagactttagttccacaacactaaacctataagttggggaaatacaatgttccagcaagaagttaccattaccgctccgaacggtctgcacacccgccctgctgcccagtttgtaaaagaagctaagggcttcacttctgaaattactgtgacttccaacggcaaaagcgccagcgcgaaaagcctgtttaaactgcagactctgggcctgactcaaggtaccgttgtgactatctccgcagaaggcgaagacgagcagaaagcggttgaacatctggttaaactgatggcggaactcgagtaatttcccgggttcttttaaaaatcagtcacaagtaaggtagggttatgattagtggcattttagcatccccgggtatcgctttcggtaaagctctgcttctgaaagaagacgaaattgtcattgaccggaaaaaaatttctgccgaccaggttgatcaggaagttgaacgttttctgagcggtcgtgccaaggcaagtgcccagctggaaacgatcaaaacgaaagctggtgaaacgttcggtgaagaaaaagaagccatctttgaagggcatattatgctgctcgaagatgaggagctggagcaggaaatcatagccctgattaaagataagcacatgacagctgacgcagctgctcatgaagttatcgaaggtcaggcttctgccctggaagagctggatgatgaatacctgaaagaacgtgcggctgacgtacgtgatatcggtaagcgcctgctgcgcaacatcctgggcctgaagattatcgacctgagcgccattcaggatgaagtcattctggttgccgctgacctgacgccgtccgaaaccgcacagctgaacctgaagaaggtgctgggtttcatcaccgacgcgggtggccgtacttcccacacctctatcatggcgcgttctctggaactacctgctatcgtgggtaccggtagcgtcacctctcaggtgaaaaatgacgactatctgattctggatgccgtaaataatcaggtttacgtcaatccaaccaacgaagttattgataaaatgcgcgctgttcaggagcaagtggcttctgaaaaagcagagcttgctaaactgaaagatctgccagctattacgctggacggtcaccaggtagaagtatgcgctaacattggtacggttcgtgacgttgaaggtgcagagcgtaacggcgctgaaggcgttggtctgtatcgtactgagttcctgttcatggaccgcgacgcactgcccactgaagaagaacagtttgctgcttacaaagcagtggctgaagcgtgtggcagccaagcggttatcgttcgtaccatggacatcggcggcgacaaagagctgccatacatgaacttcccgaaagaagagaacccgttcctcggctggcgcgctatccgtatcgcgatggatcgtagagagatcctgcgcgatcagctccgcgctatcctgcgtgccagcgctttcggtaaattgcgcattatgttcccgatgatcatctctgttgaagaagtgcgtgcactgcgcaaagagatcgaaatctacaaacaggaactgcgcgacgaaggtaaagcgtttgacgagagtattgaaatcggcgtaatggtggaaacaccggctgccgcaacaattgcacgtcatttagccaaagaagttgatttctttagtatcggcaccaatgatttaacgcagtacactctggcagttgaccgtggtaatgatatgattagtcacctttaccagccaatgagtccgtccgtgctgaacttgatcaagcaagttattgatgcttctcatgctgaaggcaaatggactggcatgtgtggtgagcttgctggcgatgaacgtgctacacttctgttgctggggatgggtctggacgaattctctatgagcgccatttctatcccgcgcattaagaagattatccgtaacacgaacttcgaagatgcgaaggtgttagcagagcaggctcttgctcaaccgacaacggacgagttaatgacgctggttaacaagttcattgaagaaaaaacaatctgctaatccacgagatgcggcccaatttactgcttaggagaagatcatgggtttgttcgataaactgaaatctctggtttccgacgacaagaaggataccggaactattgagatcattgctccgctctctggcgagatcgtcaatatcgaagacgtgccggatgtcgtttttgcggaaaaaatcgttggtgatggtattgctatcaaaccaacgggtaacaaaatggtcgcgccagtagacggcaccattggtaaaatctttgaaaccaaccacgcattctctatcgaatctgatagcggcgttgaactgttcgtccacttcggtatcgacaccgttgaactgaaaggcgaaggcttcaagcgtattgctgaagaaggtcagcgcgtgaaagttggcgatactgtcattgaatttgatctgccgctgctggaagagaaagccaagtctaccctgactccggttgttatctccaacatggacgaaatcaaagaactgatcaaactgtccggtagcgtaaccgtgggtgaaaccccggttatccgcatcaagaagtaattcttgccgcagtgaaaaatggcgcccatcggcgccatttttttatgcttccgccagcggcggcaaaatcaattcatcgctctcatgctgctgggtgtagcgcatcacttccagtacgcgcaaccccgctcggtgcactgcatcggttaacgccttccctttcagcaagccactgatgagctgagcacaaaacaggtcgccagtccctttcaggtcggtttttacccgactatgggaaatgacattcacgctgtcggcagtgaccaccacaacctgcatctcctgattttcttcattaccggaggcgctggtaaccaccacccattttaatgtgtcactaagcagactttttgcggcagcaatggcactgtcgagatcgcggcaatttttaccggtcaggatttccaactcaaagatattgggggtaattccctgcgccagcggcagtaaatattgtcgatacgcttcgggaaggtcaggtttgacataaattccgctatcaatatcgccaatcaccggatcgaccatgatcaataggtcaggatggtctttgcgtagcgcagtcagccactcggcaaggattttgatttggcttgccgttcccatatagcccgtggttacagcacgaagttggcgcagcgcatcacgctcctgaagcgcacgcaaatagccgctaaaccattcgtccggaatcgcaccaccgtagaaagtgtcataatgcggcgtattgctcagcaataccgtcggcacggcaaagacattcaggccgttctgtttgatagcaggcacggcaatgctgttgcccacgctgccgtaaaccacctggctctgcacggcgacgatatccgcctgcagtgccctactcttatcgttaaacaacaacaaactactcatttaattttttctccttgccgatgatcctcatcgtaatccaaccgaaactttacctgattctggcagtcaaatcggctatcacaaaacaaggataaggtaattcaatgaagaaaatcatttgtctggtcattacactactaatgacactccccgtttacgcgaagttaactgcccatgaagaagcccgcatcaacgccatgctggagggattagcacagaaaaaggatttgatatttgtgcgcaacggtgatgaacatacctgctatgaagcggtttctcatctgcgtctgaagctcggcaatacccgtaaccgcattgacactgccgagcagtttattgataaggttgctagcagcagtagcattactgggaagccgtatattgtgaagatccccggtaagagcgatgagaacgcacagccttttttacatgcgttaattgcgcagacggataaaacggtgcctgcggaaggaaattaatccgctttgggaaggcatttacaggaggtaacatgaaaaaacgctttatttatcacgatgaaaaaagcaataaattttggtggatagattacgaaggggatagtttagctgtcaactatggcaaggtaggtagtattggtaaattccagacaaaagagttcgataatgaagaacagtgtctgaaagaagccagtaaattgattgccgcaaaaatgaagaaaggctatcaagaagatccaaagtttaacttcatggatcgctactattttgatgatgaagaaattgggttacatgttaaaacgagtcacccaaacttccagtgccattttactgatccactttatatgtgttgctgggatgaagaatctccttttggcagcgatgaaggtgctgatgctctaaacgttcttgaaaatagcctccgtaaagagccggatctggactgtgctgatttccctcaaatgttaattgaaactatgtggggtatgaaatacatcgctatggacagtattcttgaagaggatgttcgtgcgcaattactagtcgatgaaatgagcactatccagagcaatatgattacctacgcaactgcattcggtcagattaaagtcatgggtaaaatctcccataaacttaaaaagatgggactcaatgcactagcgcgtcatcagcttaccgcaaaaattcttcaatggggtgacggtcaggacagtccaatacttcaaaaaatgattgatgaccttacggcgtttcctcacgaaaattaaatactgcatttgtcggcagcaacaactgttaaaaaagtgcgctttgtttatgccggatgcggcgtaaacgccttatccggcctacaaaatcgtgctaattcaatatattgcagaaaccttgtaggcctgataagcgtagcgcatcaggcagttttgcgtttgtcatcagtctccgatgctattaatccttaaatccccgccccctggctaaaatgctcttccccaaacaccccggtagaaaggtagcgatcgccacgatcgcagatgatcgccaccaccaccgcgtcagggttagcttttgccacccgcagtgctccggcaaccgcgccgccggagctgacgccacagaatattccttcccgcaccgccagttcgcgcatggtgttttccgcatcgcgctgatgaatatccagcacctcatccaccagagaagcgttgaaaatccccggcagatattccgtaggccagcggcgaatgccgggaatgctgctgccctcttccggttgcaggccgacaatggtcaccggtttggattgttcgcgcataaagcgactgacgccggtgatagtgccggtcgtccccatgctggagacaaaatgagtgatgcgcccgccggtttgctgccagatttccggcccagtggtggtgtaatgcgcataagggttatcgggattattgaactgatcgagcagctttccttcgccacgattcgccatctccagcgccagatcgcgcgcaccttccatgccctgctctttggtgacaagaatcagttccgcaccataagcacgcatcgccgcacggcgttcctggctcatgttgtcgggcatcagcaatttcatgcgatagcctttcagcgcggcaatcattgccagcgcaatgccggtgttaccactggtggcttcgattaagacatcacccggtttaatttccccgcgcttttccgcctcgacgatcatgctaagtgccgcacgatctttcacgctacctgccgggttattgccttccagttttaaccacacttcactgccgttatccggccccattcgctgcaacttcaccagaggcgtattgcctattgtttgttctaatgtactcacgatctctatccatacgtggtgttgcctgatgcgacgcttgcgcgtcttatcaggtctacaggttacaaaccttgccattaaaaagcccggatcgcgggaagcgcctccgggcgtttaacattcactcaacctatcaggcgctttgtgcgagagcaagttcctcatcgcgggtttcgatacgctcgtcgccgttatacagccgcgcatgttgcagaccaacgaataaacgctcgccacgctgcggggcatcgtcgccatgcatcacgaccgtcagcggttcgttgtaccaccccagcggctgcaccactaattgggtgtagtgacctttcgggctggcttccagtacctgtaccggcagcgggctatcgaggctggtacggcggctgatatccacttcccaagggcgcaggaagagatccaccggcccctgatacgcaggtgtgtagcccagcggccagcgatgcgcgccaacatggaactgcccgccgcgaatggttccctgcaggcggttcacttcgcccataaattcgagcacaaaacgggtcgccggttcgcgccatacctgatccggcgcgtcagcctgttcaatattgccctggctcatcacaactacacgatcagctacttcggtcgcttcttcctgatcgtgggtcacaaaaacgctggtgaattttagttcttcatggagttgacgcagccagcgacgcagctctttacgcacctgcgcatccagcgcgccaaacggttcatcaagcagcagaatttgcggttccacagccagcgcgcgcgccagcgccacgcgctgtttctggccgccggaaagctgcgccggataacgatccgccagatgggcaagctggaccatttccagcaattttgtcactttcgctttgatggctgcggcattcgggcgctcgcgacgcggcagcaccgtcaggccaaaagcgatattgtcgaacaccgtcatatggcggaacagcgcgtaatgctggaacacgaaaccgactttacgatcacgtgcgtgcaggcggctcacgtcggtgccgtggaagcgaatatgcccgctggtttgatgctccagcccggcgataatgcgcagcagcgtggttttcccggaaccggacggccccagcaacgcgaccatctgaccactaggaatatccagactgatatcgttcagcacctgggtgcgaccaaagctcttcttaatattggcaatctcaatgctcatgatgttcctcctgctgtgcgcgtttttcctgattctccaggcgccactgcaacatactttttaaaaacagggtgataatcgccatcagcgttaacagcgccgcagcggtaaaggagccgacggtgttgtagtcctgctccagcaattcaatctgtaacggcaggctcagggtttcgccgcgaatgctgccggaaaccacgctcaccgcgccaaactcgccaattgcgcgggcgttggtcaacaccacgccataaagcagcgcccagcggatgttcggtaatgtgacgcgacggaacatctgccagccggacgcgccaagcaaaatcgccgcttcgtcttcctggctgccctggcttaacatcaccggcaccagttcgcgcaccacaaacggacacgtcacgaagatggtgaccagcaccattcccggccaggagaacataatttgcaggttatgctcgtcgagccaaccgccgagcgggccgttagagccgtagaacagcaaatacaccagaccggcaaccaccgggcttacggcaaacggaatgtccagtagcgtcagcagtaactggcgtccagggaagttaaagcgcgtcaccagccaggccagcagaatgccgaacaccaggtttaccggtacggcaatcagcgcgatcatcaccgtcagccagatggcgtgcagcatgtccggatcggccagattctgtaaaaccggcatcagccccttgctgaatgcctgcacgaagatgtaaatcatcggcaccagcaggatgaacgcgctaaccagcatcccgatgccaatcagaaaccatttgccccagttaatcgggcgcgcgtcataacgcttcaattgggtaacttccgccattaatgacctaccacacgccgaccaaagcgactttgcagagtgttaatactgaacagcagcagcagagatgccgcgaggatcacgctagcaatcgcgctcgctgccgggtaatcaaactcctgtaagcgcacaaaaatcatcaggctcgtcacttccgtcttccacgcgatatttccggcgataaaaatcaccgcgccaaattcaccaagactacgggtaaagctcagcgccacgcccgccaccagcgccggagaaagctccggcagcaccactttgcagaaactctgccagcgcgttgcaccaagcgtttccgccgcttcttcatattccgggcctaactcttccagcaccggctgcacggtacgcaccacaaacggaatgctggtaaaggccatagccaccgcaatccccagccatgtataggtgactttgatatcaaacttcgccagccattcaccgtaaaaaccgtttacggaaaagaggctggccagcgttaaaccggcgacagccgttggcagcgcaaagggtaaatccatcagcgcatcaagcagcgtgcggcctgggaagcgatagcgggttaggatccacgccatcagcagaccgaaaacgccgttaaaaatgcttgccacaaacgcgctcagcagcgttactttgtaggccgcgaccacctgcgggttggtgatcacctcccagtactgcgcccagctcatctgggccagttgcatcaccagcgcggagagcggcagcagcaaaatcaggcacacaaacagcagactggtgccgaggcttaaggtaaagcccggcagcacgcgtctggaggagacagcaaacatcagttacgccccgccgctaacagcttgtctaactcgccgccgctggtgaagtgggttttcatcacttccggccaggagccaaatttgtcttccacgcggaacagctcggtctgcgggaatttgtctttcagtttgtccatcacctccgggttattcacgcggtagtaatagtcggtgatgatggtttgcgcctgcgggctatagagccagttcagataggctttggcggctttttccgtaccgttggcctgcacgtttttatcaacccacgccaccgggaattccgccagaatgttggttttcggaatcaccacttcaaagccctgcgcttcatactgtttacggatgttgttcacttcgctttcgaagctaatcagcacatcgcccaggccgcgctcggcaaaagtggtggtcgcgccacgaccgccagtatcgaacacttcaacgtttttcaggaactgggtcataaactgttcggttttgcctttgtcaccaccgtcagctttatccgctgcgccccatgccgccagataggtataacgcgcgttaccgctcgttttcgggttcgggaaaatcagcttcacgtcggagcgcaccaggtcgttccaatcgtggatattcttcgggttacccttacgcaccaggaagcccatggtggagtagaacgggctgctattattcggcaggcggctctgccagtcggccgggatcagcttgcctttatcgtgcaggatttgtacgtcggtcacctggttataagtgacaacgtcggcttttaagccctgtaaaatcgccagcgcctgtttactactcccggcatgagattgttttatcgtcagtttgtcgccgccgttatcttttgcccattgttgctcaaacggcggattcagggcggcaaacagctcgcgggagacgtcataagaactgttcagcagttccgttgcctgtacatggcccgccagcagcagagaagcgaccagcgcgagactgttctttttcagtaagttaacggccattgcgcacccttataaatttaatgactttctaatagccatcatatttataacggacgtgaaaggagtaacggttttatataccgtttggtgatttggaagttgaaaagggaataagaacttggttcaacaggcgtaattgttgcagtcagtttggacacgaacagcgcggagaaaccggagcgtacacatagtacgtgaggatttcgagcactgcccggggccaaaatgacaaataaaatagcctggtgaacttagttcaagacgaaatcctccccacaaatgcagggaggaaacagaggtgaatcagataccgacgctaaccgtctccggcagtgtgctgccgccatcaatcacattctgtgtaccggttaaatagctggattcatcgcttgcgaggaaggccgccagttcgccgacttccagcggatcggcgaggcgacgcatcgggattgctttcgccatttcagtcagcacgctctctggatcttccgggttgctctggcgggcaatgctttccgccattggtgtgcgcacgtatcccgggcaaatggcgttaacgcgaataccagactgcgcgtactccaccgccaggctttttgtcaggccaacaatcgccgctttcgttaaggcgtacgccgtttcgccaggatcggccaccatatcaccagtgacactagacatcatcacaatgcgaccatctttgcgggcaatcatctccggcagcaccgccttcgtgacgttccatacgcctttaatattgatgtcaatatggaaatcgcgatcgtcatcgctcatatcgaggaaactgcccagacgacaaacgcctgcgttattcaccaggatatcaatgcgcccttctttttccttcgcgcgtttgatagctgcggctacgctcgccgggtcacgcacatcggcgacaaccgccgtacagcgatgaccacgaccacacagttcgtccgccagcttttcgatctcaggggagatatccagcaagattaggttcgcgccatgacgtgcaaaagttctggcaattccttcgccaattccctgcaatgcgcccgtaatcagtgctgtcttgcccgtgagtttacccattttaatgctctccttgttaatacagagcgttacactccattccctctgaaaatacaggataaacaaaatattgctgcggatcagctcactaattcaggaaaatctcaatccagtcgctgctttatgcatcatttcaggcgttgtgttagctcactgctgcgctgaatcattttcaaactctccacatcattgagttgcacaaggccaacaaacagtaaatcggtaacagaattttgcgccgtgcgggtagacatgctgctgctacgccattcggtttctccggaaacggtatcgagggtgaaatgcgccagccgccgcagcggagagtcagtcagagaagtaatggcaatcaccgttgccccctgctttcgtgccgcttctgcgcacaagacaatctcttttttactgccgctgtaagagatagcgatttgtacatcgccttttttcaacgcctgagaaacggtggcttgtacgtgcgtgtcggcttcgcaggccacgcgatagccaattttcatcagtttgaagctcagatcgcgccccaccagcgcgcttccgcccaggcccgttatctggataaacggtgctttactgatgacctcaatgattttttgcagccgcgcgtaatcgagcaacgcgcaggtttgctccagcgccagctctttttcgcgattcagtttgcgcgcgatcacttccaggctatcatcactggtaatgctactgtgcaggtgcagtgccgtggcattcgttttctcccggctggcactgtattcgcctattaacgccatacgcaattcagtaaatccttgcgcgccgagtttttgggcaaatttcactatgctgctctggctaatgccgagctgtttcgccatctgccgactagaaacggattgcagctcactcacgttggcctgcagaaagtcagcgattttttgctcgttttcggtgaattcactccccgcattgcttattttcgtcaggtacaacatcttccactctcctgggctggcagcataaattccgcttaagttcttatgacgctcttcacactctgcgagtgtagactcaatgattcctttaagcctgtcaattcgggatatatgattccatacatctgcaattatttgatcgtaaatagtaaggtcaccaccgatgcaatttgaaaagatgattactgaaggcagcaacaccgccagcgctgaaattgaccgcgtaagcacgctggaaatgtgccggattatcaacgatgaagataaaaccgtaccgcttgccgttgagcgcgtactgccggatatcgccgcggcgatcgatgttatccacgcccaggtaagcggcggcgggcgtctgatttacctcggtgcgggaacatccggtcgtctggggattctggatgccagcgaatgtccgcccacctacggcgtgaaaccgggtctggtggttggtttgattgctggcggcgaatatgccattcagcacgcggtggaaggcgcggaagatagccgggaaggcggtgttaatgatctgaaaaatattaatttaacggcacaggatgtggtggttggcattgctgccagcggtcgcacgccgtatgtgattgccggactggaatacgcacgccagctcggctgccgcacagtgggaatttcctgtaatccggggagcgccgttagtaccaccgctgagtttgccattacaccgattgtaggtgccgaagttgttaccggttctagccggatgaaagcaggtacagcgcagaaactggtgctcaatatgctttccaccgggctgatgattaaatccggcaaagtgttcggcaacctgatggtcgatgtggtcgccaccaacgaaaaactgcatgtgcgacaggtcaatattgttaaaaacgccaccggatgtagcgcagagcaagcggaagcggcgttaattgcttgcgagcgcaactgtaaaacggccattgtgatggtgctgaaaaatctcgatgccgcagaagctaaaaaacgcctggatcaacacggcggctttattcgtcaggttttagacaaggaataacccatggccaaagagatcagcagtgaacttctgaacaccattcttacccgtgtcggcggaccgggaaatatcgccagttgtggtaactgtatgacgcgcctgcgtctgggtgtacatgacagtagtctggttgatcccaatatcaaaacgctggaaggcgtgaagggcgtcattttgaccagcgaccaggtgcaggtcgtttttgggcctggtaaagcgcatcgtgccgcaaaagcgatgagcgagctgctgggagaagcaccggtacaggatgccgcagaaatcgccgcccagaacaaacgtcagttaaaagccaaacaaacctccggcgtgcaacaatttctcgccaaattcgccaccatcttcacgccgctgatccccggttttattgccgccggtctgctgctggggatagcgacgttaattgccacggtgatgcacgttccggcagatgctcagggaacactacccgatgcgctgaattttatgaaggtgttcagcaaaggtttgttcactttcctggtgattctggtgggctataacgccgcccaggcatttggcggcacgggcgtaaatggcgcaattatcgccgcgctctttttgctcggttataaccccgcagcgaccaccggttactacgccggttttcacgatttctttggtctgcccatcgatccgcgcggcaatattatcggcgtgctgattgccgcgtgggcctgcgcccgcattgaaggcatggtgcgccgctttatgccggacgatctcgacatgctgctgaccagcttaatcaccctgctgatcaccgctacgcttgcgtacctgatcattatgccgctgggtggctggttattcgaaggtatgagttggctgtttatgcacctgaacagtaatccgttcggttgtgcggttttagccgggctgttcctgatcgccgtggtatttggcgtgcatcagggctttattcctgtttacctcgcgttaatggacagccagggattcaacagcttatttcccatccttagtatggcaggcgcgggccaggtgggcgcggcgctggcactctactggcgggcgcaaccgcacagtgcgctacgcagtcaggtacgcggggcgattattcccggcctgctgggcgttggtgaaccgctgatttacggtgtcaccctgccccgcatgaagccgtttgttaccgcctgtttaggcggcgcggcgggcggtttgtttatcggcctgatagcctggtggggtctgccgatgggcttaaacagcgcctttgggccgtctggtctggtagcgctgccgctgatgacttccgcacaaggcatccttccggccatggcggtttatgctggcgggattctggtggcatgggtttgcgggtttattttcaccacgctctttggctgccgtaacgtcaatctggactgatatcatgaaacggacaatgctctatctttctctgctggctgttagttgtagcgtcagcgccgcaaaataccctgttctgacagaaagcagcccagagaaagcagggtttaacgtcgaacggcttaaccagatggatcgctggattagccagcaagttgatgtcggttatcccagcgtaaacctgctgatcattaaagataatcagattgtgtatcgcaaagcctggggagcggcgaaaaagtacgatggcagcgtgttgatggaacagcctgtcaaagccaccaccgggacgctgtatgacctggccagtaacaccaaaatgtacgccacgaacttcgccctgcaaaagctgatgagcgaaggcaaactgcatcctgacgatcggattgcgaaatatattccggggtttgccgatagtccaaatgacaccattaaaggcaaaaacaccctgcggatttctgacctgctgcatcacagcggcggtttcccggcagatccgcaatacccgaataaagcggtcgcgggcgcgttatattcccaggataaaggccagacgctggagatgatcaagcgcacgccgctggaatatcagcccggcagcaaacatatctacagcgatgtcgattatatgctgcttggatttatcgtcgagagcgttaccggtcagccgcttgaccgctatgttgaagagagcatttatcgcccgctcggcctgacacatacggtatttaacccgctgctgaaaggctttaaaccgcaacaaattgccgccacggaattgaacggcaatacccgcgatggcgtgatccatttcccgaatatccgcacctccactctctggggtcaggtgcacgatgaaaaagccttttatagcatgggcggcgtttccgggcacgcaggtttgttttccaataccggcgatattgcggtgttaatgcaaacgatgctgaacggcgggggctatggtgatgtgcagctgttcaatgcggaaacggtgaagatgttcaccaccagctctaaggaagatgccacttttggcctcggctggcgcgtgaatggtaatgccaccatgacgccgacgtttggcacgctggcaagcccgcaaacctacggtcacactggctggaccggaacggtgaccgttatcgatccggtgaatcatatgacgattgtgatgttaagcaacaagccacatagcccggttgccgatccgcaaaagaatcccaatatgttcgaaagcggtcagttgccgattgcaacttatggttgggtagttgatcaggtgtatgcggcgttaaagcagaagtaataaaaaggccagtcagtaatgttactggctggtctgagagtgctgacaaacgcaaaactgcctgatgcgctacgcttatcaggcctacgtggagcccacaatatattgaattagcacgatttcgtaggccggataaggcgttcacgccgcatccggcgtgtacaacgcgcacttggtcaacaatctgaggccagtcagtaatgttactgcctggcctttaatcaatgaatcagaaacgcttacagcgccatcaacttgtccaggctcggtgcgaaataatagccgccggttaccggtttggtgaaacgcaacatcgcatcacgcttaccatcggtatcgccaaacatgctcagcagttgctgctcaatgttatgcagacgcgcgcagtaggcgcagaagtacagaccgtgagtgccactggcagtgccgtacggcaggctctggcgaacaatcttcagccctttgccatcttctttcagatcaacgcgggtgaggtgagaggtttccggacgttcgtcgccgtcgatctcttcgttggcctctttggtgcgcccgatcaccatctcctgatcgtgaacgctcatccggttgagctgcttcaggttgtgttcccaacgctggacaaacacatagctgccgcccgcatccacgccgtctttgataaccgccacttcgcgacgcgtctcttcacccgccgggttttccgtaccgtcaacaaagccgctcaggtcacgctcttcaacccaacggaagccgtggatctcttctttcacttcaatgcagtcaccaaaggcttccatcgccgcctgggcgacagagaagtttacgtcgtgacgcagagaaagaatgtggatcaacacatcgaactgggtcgtcggcgcaaggcctttaccgtagcccggaaaatctttcagctcttctgccccaacgccgccgctcagagcgcgccaggtgttgttaccaaaggcaaccaccgcaccaagatgcgcgtccgggaatttcgcttcaaaagttgccagtttgtcggcaaatgttttactggccgcacgcagggcgtcaacttcccctttcacgttggcttcgatccaaatcgccgcgcggcaatgttctggcaaaatgccactctgaacctgagacattgttcctcctgaaaataataatgccacgcaatccgtggcattgttgagcgctattttacgtgttttttcgcggcggcggtttgttcagacgcaaattaacgccgccagataattttactgactttccagtttttcagggtatcgtcgctaggcattaacccttcaggaccacgccattccccgctgaactggtagctaatatgttgactgccttcggctttacattcgacggcacgattatcatcaccatcagctttttggcaattgccaaatgctttgctgtaaaggtcgctaaacggtgtaccgattttaacaccggtgtcagcaggaatatcgctatccagcacgtcaatgcgactgatcgtgccttgatcgccgttaatcaccatcgccacgttgtcgcccttcatcacttcaaaaaagcgcaccacgttgccgttcgcggttttcattccgctgcgcaggcgataatcgccatcaagcgcatcggcaatggcttgttcttgcagtggtgtggacgccgttaattcacccacgccctgctcgctcactttggtggagctcccaaaccagttccacgggttagcggcagaccagttaacactgctcatcgtggaacagccggtcagcatcaatggcatagcgcataacattaaacgcaggcttttcatgtcacttcctttggttattcaataacgttgcttggagtgcaaattcaccaaaaagtgccgttattcttttacttcataaaaacaagcgcgtaaacgtcgattggtcagcagccagattaacgccacaatatccgccactaccagcgccagaccgataccgctaacggattcaccgttcagccacagccacggttgccagcaaagtaaaaccacctgcgccaacagcaacagaaaatagagtacacgccaggtgcgaggaaacgtagcccgccgaccgctcaacaaaaacgccagcaccgccggaatgccaggaatcagccccagccagaaattatcgtgatcgggataaaacagatttagcagcgcagtaccctgctcgcggctcgcaccggcaatgacaaacagcacccaggttcgcgcctgaagcaatagcacaagccagaagagcaagggtaaacgcaggcgaccgtgcgcatcataatggacaggatgaaactcagtactcttcatcttcaatcaaacgcttacccagactcagcacgtcggcgtgttcatatcccaggcgttcatacattccgagcaccatgtcgttatcttccggcacattgatctgaattttcgggcagccacgagcaatcagctttttctccagccgattaagcaacgcattggcaatcccacgcccacgaaactctggatgcacgccaagataataagcagacccgcgatgcccgtcataaccgcccatcaccgttccgaccacgtcaccgtttacctcagcgaccaaaaacaaactgacgtcatggttcatcttacgctcgatgtccatttccggatcgttccacggacgcagcaagtcgcaacgctcccaaagggtgatgacctcttcgaaatcttcctggcgaaatacgcgtatctccatggtattcgttacctttttgcgggttaaaaggctgattatggcgtgaacggtcgaattagccaatatctgacgaaaatcggttgaaaaagtggcataatggggagttgtcaactattgaaatgaaaagtaaaacaattctcaacagcaaaccgtcgtaacggattacgcgatacgatataacatctggaactttattattacaactcaggccgtatgagcacttttaaaccactaaaaacactcactagccgccgccaggtgctgaaagccggtttggctgccctgacgttgagtggaatgagccaagccatcgccaaagacgaacttttaaaaaccagcaacggacacagcaagccgaaagccaaaaaatctggcggcaaacgtgtcgttgttctcgatccaggtcacggcggaattgataccggagcgatcggacgcaacggtagcaaagaaaaacatgtggtgctggcgattgctaaaaacgtccgttccattttgcgtaatcatgggattgatgcgcgtttaacgcgttctggcgatacgtttatcccactttacgatcgcgttgaaatcgcccataaacatggcgcagatctgtttatgagtattcatgccgatggctttaccaacccgaaagctgccggtgctagcgtatttgccctctctaaccgtggggcaagtagcgcaatggcgaaatacctgtctgaacgcgaaaaccgcgccgatgaagttgccggtaaaaaggcgactgacaaggatcacctattgcaacaagtgctgtttgatctggtgcaaacagataccattaaaaatagtctgacgctcggcagccatattctgaagaagattaagccggtgcataaactgcacagccgcaacaccgaacaagcggcatttgtggtgttgaaaagtccgagcgttcctagcgtgctggtggaaaccagctttatcaccaacccggaagaagaacggctgttaggcacggcggcgtttcgtcagaaaatcgccacagcgattgctgaaggcgtgatcagttatttccactggttcgacaaccagaaagcacatagcaaaaagcgataagttatgaaacccgacgcacaccaggttaaacagtttctgctcaaccttcaggatacgatttgtcagcagctgaccgccgtcgatggcgcagaatttgtcgaagatagttggcagcgcgaagctggcggcggcgggcgtagtcgggtgttgcgtaatggtggtgttttcgaacaggcaggcgtcaactttagccatgtccacggtgaggcgatgcctgcttccgccaccgctcatcgcccggaacttgccgggcgcagtttcgaggcgatgggcgttagtctggtagtgcatccgcataacccgtatgttcccaccagccacgcgaatgtgcggttttttattgccgaaaaaccgggtgccgatcccgtctggtggtttggcggtggcttcgacttaaccccattctatggttttgaagaagatgctattcactggcatcgcaccgcccgtgacctgtgcctgccatttggcgaagacgtttatccccgttacaaaaagtggtgcgacgaatacttctacctcaaacatcgcaacgaacagcgcggtattggcgggctgttctttgatgacctgaacacgccagatttcgaccgctgttttgcctttatgcaggcggtaggcaaaggctacaccgacgcttatttaccaattgtcgagcgacggaaagcgatggcctacggcgagcgcgagcgcaatttccagttatatcgtcgcggtcgttatgtcgagttcaatctggtctgggatcgcggcacgctgtttggcctgcaaactggcgggcgcaccgagtctatcctgatgagtatgccgccactggtacgctgggaatatgattatcagccaaaagatggcagcccagaagcggcgttaagtgagtttattaaggtcagggattgggtgtaactccctcacccccactcccgcatccgctgatgcagcgtcagactcggcttctcggaaaacagctgctggtaatccgtggcaaattgccccagatgccagaatccccactgcatggcggcgtcttttaccgtcatactttggctccacggacttatcagttcgcggcgtacggcgttcaggcgaatgcgtttcagccacgcgttcgggccaatgcctaaaatagcgtgaaacgcgttttgtagcgtgcggcggctgacatgcagttgattacacaaatccagcaccgtcaccggttcggacatgttttccagcacatattcacgggcgcgggaaagcaatcgacggtaactctgatgactgatgctttccgccgtcaccattggttgcgcttcttccagcatggcccccatcgccattagcaaattatcccccagcacttttcgcactgcaggctgatggagattttccggattctcgcaaaacgtcgccagcgcctgttggacaaagccccacagcgcggctttatgctgctctttcacttccagcgcgctctggttacgcaacatatgtaatacccgatccgggttatgcaaaaagttagcctgccgggtgatgacatcttcagaaagcaccacgcccaggatcgtgtaatcatccggcgtgctcagttcaaattcagtgccaccagggcgggtggcgatttccgcgcttcccagacattggctaccgataaatccctgctcaccgcgcgtcgccggaatgccaaaccagaagctgttcggccagaccaggcagctctgacgcagcgccagaccggtgtattcacgaaaaacctgaatatcatcgagtagaatttccgtaaattcaccatgaaacttgcccggatgcagctgatcgtaaatctgctgccaggcggtaatcgttaaagcatgttcatagacatccgttgtctgtcgttgatgaacattatccacttcgaccttcggcgtgagcttcaggttttcgggtaagggttcatgataaagatggtgcaaattggctgtacgggtctttttcatgatgttaatgccgggtgttgtaggacacccggcacctccgacaggttaatggggcttgagacgataacgactactgcgtttacgtaacgtcccggcagaaaagagctgttcgagcgcatttctggctttttccagcggccagccaaagtgggcagccacttctcctgccgtcattccctgacgtacacttgttaacagcgccaacaactcgtcagcagattccgcgacgataactggcgcgtcgggttcccttacgggttgcttcggctggcggttaaagccagtaaccagccactgggtgtcatcgtctggccgaccgatctccttgcggctgatgacacgcccggtacgcatcgcggcagcacaacctgcgtccagcgccgcacgacacgccgccagatcgccttccaccaccagcgttaagcgaccagggtcaagcacttcgtgactgagcagacgaacgttagctgctttgagcatggcatccgctgcatctatcgcggcgaccatgccgtccacttccagcaatcccagtgcattgatcatcggcaacctccgttacgcacgctggattggattacgcgcgatttccagcactgcatcggtaaaggcgttacaggctgctttacacgctgcctggctaccggttaaaaatgctgcgctgtagttggtttcagacggtggcgggacataggtcgccagctgtacgtcggcagacttcagggctgcatcaatgccataggtcgcttccagcggcggtgccaccagatacgccatcggatcgccaagcgtgatcccggcggtactactgagataagaaccggtacggctaactacatgtgccaggaatgccgtatcttgcgcgtcattagcccactggaaagctgcgccattttcaatatgcgcaatcatcgcatccagacctgcacgcacttccgccgggtttggcccaccaagcataatcagcacttcaccggcagtcggactcgggccgtgtgcagcgcccgcatataggctgcggccatacaccacttccaccatcgcctgcttggtcgcttcatcagcggcaatgtaggtgacgtcatcggagtcggcagaaatcagaccgaggctacgaatatgcggcggcaatttcagttcacgcgcaaaatcggcgttaacggaggcaatcacccgcatagcggtgacagacggtcgaatcaaatctaaagctggcatgatgcctccttatcgggtcatgttgatgccggatgctttctgctccagcatacgtttcgccaaatccacaatgacggctgcggcttcaaccggcggcgtgccgccctggtgaatgttagagatacaggtgcgatcggcctcaacggtggtcgccatacgcgggctgtaaacggcgtagcaggagaggctttcactctgacccaaccccggacgttcgcccaccagcaggatcactactttcgcgccgaggatctcaccgatctgatcttcaatcttcacgcgaccataacgaacaaagaatggtgtaccgactttcagcccggcctgtttcaggcccgccatcagcggtggcaggatctcttcgtagttcacggtgatcgcatcagtactcaggccatcagaaataacgacctgtacgtccggattggcaacacactgcgctttcagcgcttcaacagcttctgcacacaggcggcggcccatatccgggcgagtcaggtagagatttttgtcgctaatttcagagcgtacttccagcaagccctgcgctttcacccactcttccggcacttctttcagtacggtatctttgctacgagagtgatcggccaggaaacgcagcagcgcctgcgtacgtggacgcggaccggcacgaccggtacaaacgcgggccacggtgctgcggcgcagttctgttaatacgtctgcgcgatgcggattttcaacaccaatccacgcttttgcttcagcggaacctaaatccagcgcacagctttcgctggtcaccggtgccgcacagttggtggtggcgcactttgcttcactcggcgcgggggccgcttgtcccatactcgccatcacgctgcgtacaatttcttcaatctgtttttgatccatgatatgttatctccgcgtcatcagaagaacagactcggatcgcccgcccgtttggtcaggcgaccgtttgccataatgcccatgctttccagccagcgttcaaactccggactcgggcgcaggttgagtaactgacgcacagtggcggtatcgtggaatgcggtggtctggtagttgagcatgatgtcatcacccagcggcatccccatgatgtagttgcagcctgcggtggcgagcaggatcatcaggttttcgttgaggttctggtcagcgtcagcgtggttggtataacagcagtcacagcccatagagatgccgctcagcttgcccataaagtgatcttctaagccagcacggataatctggcggtcgttgtagagatactccggcccaataaagccgaccacggtgttgacgataaacggatcgtaatgacgcgccagcccgtagttacgtgcttccatcgttacctggtctgcgccgaagttagcgccagcggatagcgcagagccttgtccggtttcgaagtagaggcagttttccccggcgatacggttgaactccgcgcccactgcgcgcgcttcgtcgagcatcgccagctccacgccaaactctttcagccctttttcgctgccacagatactctggaaaatcagcccgcccggtgcgccacgacggatcgcttcgatctgggtggtgacgtgcgccagtacacagccctgagttgggatgttgaatttgtcgatcacgccatagatggtatccaacacgcggcttaagttttccacgtcgtcagtcaccgggttaacgccgatcaccgcatcgcccaccccgaaggaaagcccttcgtagatttgcgcggcgatactttgcacgtcgtcacgggtgtcatttggctgcaaacgggcgctaaaggtgcccggaataccgatggtggtattggcctttttgattaccggcattttcttcgcgccgtagatcaggtccgcgttggagcaaatcttcgctaccgccgcgaccacttcgctggtcagccctttgcgggtaaaggcaatgtcgtccacgctggtttcatcgctcagcacatactcacgcagttcgctgatgctccagtttttaatctggttgtaggccgtttcgttaacatcgtcctgaatcagccgcgtcacgcagtcatcttcataggcaatcaccggattattgcggatgtccgctacggtcatttcgctcaacacctgctttgccgccacgcgctcctgactgcttgccgctgcgacgcccgccagcacatccccgctacgcagttcgttggctttagccagcacctcttttacatccttaaactgatatacattgccgaacaatgtggtctttagtttcataagtcgttccctcaggaaggaaatgcgagacttttcaccgtcaccggcacaacgcttccgccaaaaagaggcgtaccaatgtcgatatagtcccccgcgcggacaatcacttcgtcaatgactgccaacgggagttgttgtagctgtgggcgcaacaacatgcccagagctttaccaaagtcctgcccggccaccaccagcaggggatgcggattcggaaaacgcgcgacgaaatcgaccaacgcgttgatgaccgtcagtaccgcggcgtaacgcacaggcaggctggcgggaagcgccagcacgtacgcgtcagttttgggatcaagatccagctgaatcagcgcctgttgccaggcccccaccagatccgtttcatcaatcgggatcgccaccggcaaattgcgcagcggcagttgtacgccctcaagccagattgtgctgccagagaggctaagggtatgcgcgcccgcgccaatcaccgtggcgcgcacggtttgcgccggaaactgtacgttcatctcacgcaggcgcggatggtcatgcagcgcagttgccagcagcgggccaatatcggcaaaacagaacgggtcggcgggctggtggcgataacattcgcccacgccgccagaaagcgtaatgatttcgggcgtaacacctgcgggcagcaaaccggtttgcatcaatgcctgcgcgagcggactgagcgttccgtcaatcacttcgacaatcagttctgccatccgccgggtcacctgcaccagctgcgcgccggtcaggctacgggcgtcggtgcctgcaccgaagcactcatccacaatcatctgccccggtttatgagcgtaaaccacgcgcccgtggctgtcggtttccagcaggcgaccaccgacgttgaggcaggcagtgccgctgatttttccggcatcgaacagggcgtagttcgcggtgccaccgccgatgtcgatattcagtacccgacacagccgttgttcagaaagggtttgtgccccggctccgtgaccggcgatcacggattcgaggtgcggcccggcgctggcaacgacaaaatcgcccaggctctgagagagcgccatcaccgccgggcgagcattgcgggttttcgcgctttcaccggtgatgatgatggcaccagaatcaacgctttccggctcaatacccgcagcatgatattgctcgagtattaaggttttcagttccgcttcttttaaaccgccctgtttatcgacaggggtaaagaacaccggactttgccagctaatttcgcgtttaatgaattcgtagcgcggcacctggctcaccgccgcacggttaaccagctccagccgggagaaaatcacctgggtggtggtggtgccgatatcgataccgacgctcaatagctggcgagtgttcacgattgtgcctccgcttcggtttaagtcagctttgtgcctccgcttcggttttagtcgcggtcgcgtcttcttttggcaccagcatcatcgccacgccaatcgccgttacgccgccgatcaacttgccgacaatcatcgggaagatcatggcgttcatgttggcagcggcgaagcctaagtggtcgcccagggcgaaagcagcggaaacggcgaaggcgcagttgatgactttgccgcgggtatccatctgcttcatcatgccgaacatcgggatgttgttggcaagcgttgccaccatgccggctgccgcgatgttgttcatattcagtactttaccgacgctcatcagcggtttttcaaaccagcgagtcagcagcagcaccatcggatacgcccctaacagaacgcaggagatagaaccgataacttcaatggcgcgcatcacctcaccgggtttatcgccaggggccataaagataggatccagaccggggatcagttcccagccaagcaggaatttcactaccgcagcggcaagaccgagggtgatcaatgcaacgaggaatttggcgaagatctggaagccgttgatcattttttccgggatgaatttcagccccagcgccaccagaatcgcaacaatgatcaccgggatcatgttcatcaggatcagggcgaaagtgaattccaccggctggccgttgatctgcacaccggagtacatagcaaccagaccaccagcgatacaaccaatcggaatggtcacaatgcccgccagcacgccgagcgccagataacgacggtcagaaggttcgataatgccgagcgccaccggaatggaaaacacaatcgttggccccatcatgctcccgagaattaacccagagtatagccacgcggctacgtcgccgcccgccagctctttggcgaggaagaagccgcccatatcgcacgccagcagtgttccggcgaacatgcttgggttagcgccgagcatttcgtaaaccggaataattaccggcccgagaacgtgagccagtaccggtgccagcgcggtcataccgaccatcgccaggcccagtgcgcccattgccataaagccttcttcgaactgaccgccacttccttcgatacttttaccgaacttaccgaggaaacgagcagaaccgccgaactggctcaggatcctgtctacggcagctatcagcataaagaacatcatgatgtacatgatgatttcgttaattcccatcgcctttactccctgttagttgttatttattggcggatgcggcgtaaacgccttatccgccctacatgtgcaatcccgtaggctggataagacgcggcaagcgtcgcatccggcaattgcaccgcgccactggcggatgcggcgtgaacgccttatccgccctacatgtgcaatcccgtaggctggataagatgcggcaagcgtcgcatccggcatttattgcgccgctgcgtacaggccgacaatctgctccaggctggcggtacgcgggttactgcgcagacaaatatcttccagcgcggcctgcgcccatgcgccgtaatgcgcagatgtcgcaccaacatcgcccagtcgtttaccaatcccaacttccgcaatcagctcacttaccgcgttaatagcgtcacgatcgtcggattttttagttcgcagtgcccgaccaatctgactaaagcgttcacgacaaaccatccggttaaattccatcaccgttggcagcaacatggcgttcgcgagaccgtgcggaatatgcagcgccgcgcccggctgatgcgccatcgcgtggcacaacccaagacccgcactggaaaacgccattcccgccatacaactagccagcaacatgctctcgcgcgcggcaaggtcgtgaccgtagcccaccgctttcggcaggcttttgccaatcatcgcaatggcaccaatcgccagactgtcggtaaacggtgtagcgttcagggcgctgtatgcttcaatggcatgggttaacgcatcaatgccggtcatcgccgtgacatggctcggcacaccttcggtcaatgcggcgtcgaggatcgccacatccggcatcaggctggcatgggctaacacctgcttgcgcccgctcaccgcgtcgataatcaccgttacattggtggtttcagagccggttccggcggtagttggaatggcaatcagcggcaagcgcggttgcagaacgctggtttcactcatctctgccagcgtgctatccgggttcgtcaccagcaacgtcacggctttcgccgcatccagcacgctgccgccgccaaacgcgatcaccccatcacagccactctcacgcaactgcgccacggctgcacacacgtcggtaatgcacggttcgcccaccggacatggccagagcgtcatggcgatacctttaacggtcaggctacgcgtcagcccggcggtcatccctgcctgatgcaaaaagctgtctgccatcacgaacagatgtttcagcccacgcgtttgcgcttgctgtccgcaactgctcacgctgcccggaccgcaaagcgtcaccggtggaacgctaaatgtttttacccgttgcagattcagggtatcgaacgcctgaaagagcgcggtctgcaattcattttgcatatagcccctccgctttctctcgcccactactggcgatcgccagcggggtcataaacaaactgtgctgcggtaaatgcacctgtaacgccgggaattgtttgcgaaacagttccgccacgcccggttgcatacaagagccgcccgccagccataaatcagtaatgccctgcccttcaatatgccgggcgacaatgtccgccattttttcgtacaccggtttcaccgcaggccaaatctcttcaccgtgaccgcgcttgtactgctccgcctcttccaggctaatacggcgatttccggcgagagtcagagagatgtgatgtccgccggtggcttcatccgcgctgtacgtcaccttgccctttttcacgatggcaatgccggtagtgccgccgccgatatccactacaccggcgttgtccagttgcagcagatccgcaactgcggttggctcatccagcacatggctcacttccagtccggcagattccagcacgttgatggaaatacgcgggtccgtacctggaggaaaactagtcgccgcatggctaaaacgacgaccgaattgctgctcgagcgtgtcgagatggcgacgaacaatggtgacagcgccgaagaaatcccagacgatgccgtcgcgaaccacatcggcccagtcgaggcataccgccactggctgaccgtcgcggtcgacaaccatgctcaccacatcgcaggtgcccagatccacccccagccacagcggagattccgtcgcggcgggcgtctggttacacagcgttgccgccgtttgcagacgtggggtgagccattgttcgtcgtgcgccatctgttactccttaaacaatgcgaaacgcatcgactaatacacagcgacgcagacggacaaacgtacgcgcgctggttaccccttcaccggttggcgtggtgatggtcatggtggtccagccttccccgcccagccccagcccggcaatgcacggtccgttcttaacgaaaatgctggtatcaatagcattcgccatctggttcatgttttcgatgttgcggctgtgcattgccgccgtgtggtggcaaccgccttccagtttcaccgctagcgcaatggcatccgccacgttggcgacgcgcacgacgggcaacaccggcatcatcagttcagtcacggcaaacggatgttctgcggtggtttccacaaacagcaggcgcgtttcttgcggaactttaaggccgattgccgccgcgattttgcctgcgtcgcgaccaacccagtcacggctgacggtgccttttccgcgctcgtcgatatttttcagcaacaccggttgcagctgctgcgcctgttctgcggtcagtttcaccgcgtgctggccttccatcagacgcatcagttcatcggctacgctatcaacaacaatcagtaccttttcgtcggcacaaatgatgttgttatcgaaagaagcgcctttgacgatggactgagcggcacgggcgaggtcggcggtttcatccaccactaccggcgggttgccagcgcctgcggcaatcagacgtttattggtgtgtttacgcgccgcttctactaccgcttcgccgccggttaccaccagcaggccgatacccggaaacttgaacaagcgttgcgcggtttcgatatccggatttgccacagtaaccagtaagttttccggcccacctgcggcaacaatcgcctggttgagcagcgtaatcgcccgctgggagacttttttcgccgccggatgcggggcaaaaatgacgctgttgcccgcggcaatcaggctgatggcgttgttaattacggttgccgccgggttagtggaaggcgtcacgctagccaccacgccccagggtgcgttttcaattagggtcaggccgttgtcgccagtcagcacttgcggagagaggcactcaacgcctggtgtgccgcgcgcctgagcgacgttttttgcaaatttatcttcaacgcgccccatgccggtttcactgacggcaagttccgctaaatctctggcgtgtttttcgcctgcttcacgaatggcagcaatggctaactggcgcattgccacgctttttaacccttgctgggcgactttggctgccgcaacggcgtcatccagggacgcgaaaacgcccatctcatgaacggcggcggacggcgtgtcactgctttgcattttcagcagtaccgctttcaccacctgttcaatatcctgttgattcatgatgttctgccttatttgtggaaaattacctgaccgccagacaccacctcatcgacaatgccaatcacgcacagatcgaccggactcgtttcgcttttatgcgcctggcgggcggaactgccactcaccagtaacacccactccccggttcccgcgccaatattgtcgatggcgacggcgcattgcccgtcaggattaccttgtggatcaatcatttccaccatcagcaatttgtcatgcgccagtccgtgatggcgtacggtacaaacaatttgtccagtgacgactgccagtttcatacccgcctccgtggcgtatttcaggtaaaagctccccctaccctccgcagaaggtaaaatgaaaaaggagagagcgtgacgcccgaatcgacgtcacacagggtgattacaggttgctgctatcgcctttcaggccgatcgggaagacttcttccaggtcgccgtgcggacgcgggataacgtgtacagataccagctcgccgatacgctgtgccgctgcggcacctgcatcggtcgcggctttacaggctgcaacatcaccacgaaccatggcagtacacaggccgccgccaatctgcttaacaccaaccagcttgacgcgcgcagctttcaccatcgcgtcagaagcctcaatcagtgcaaccaggccccgggtttcgatcattcctaatgcttccattgtgctttcctctttatcagggtccagaacgggaccgttcattcaaccagtgtttgtaaactgctttcgcggttcacttctgtctgacgcggcacagctgccaccagcgccagctcgataatttcctgcacgctacaaccacgagagagatcgtgcatcggcgcggcaagtccttgtatcagtggcccgacggcacgatatccgccgagtcgttgtgcgattttgtaaccaatatttccggcttccaggctcggaaaaaccatcacattggccttgccctgtagcgggctggcaggcgctttttgcgccgccacttccggcacgaaggcggcgtcaaactgtaactcgccatccaccaccagctttggtgcgcgctcacggacgatttctgtcgcctgctggacgttagcaacacaggggtgacgggcgctaccattgctggaaaagctcagcatcgccacgcgcggctcttctccggtgatggcgcgccaggtttcggcactggcaagcgcgatatccgccagctgcgccgccgtcggctgtggcaccacgctgcaatcggcaaagcccaacgccgggccgctgtactgtggcaacatcaggaaaatggaagagagcgttttacagcctggctgcaagccgataatgcgtaatccggcacgcagcacatttgccgtggaagagaggttgcccgcgatacagacatccgctttaccggcgctgaccattgctgcggcgaacatcagagggtcggtaagtttttccagcgcatccggcggcgttttttcgcccgcgcgggccagccagcgatgagcaaattcttcccgcattgcgaggttgccatgcggatcaatcacctgtagcccgtccatcgccacgccgtgactgagcgcaaactgacgaagttcaaacggattggcgaccagaatgggcgttgccagaccttgttgatgtaaatattgcgcggctttcagcacacgttggtctaacgcatccggaaaaaccactctggcgggcgctcgcaacgccagttcacgacaacgttcaataatcattgcgtttcccccagtcgttgttggatctgcttcaccgttagcggctgcttcgttacgctcaggatcatcatcacgtagaccgtgctgctaaggcggttcagcgcctgcaaaatgtccgggcgtaatacttcaaagctgcgggtgataaagacctgcgccgctacggtttcggtttcccgcactttggtgcgtagcagattgagcaacgcagcatcgcgcccgtggctggcttccggcaccagatgatcgtggtcgagatagcgcagcggctgatgagaaagccgatgcagatcttcgtcagaaagcccgacaatcgcctggcagcccagcggttcccccagcgcatcggcgcgcataatgttgccaagacggctacggatatccgccagccacggctgccacggttccgccagttcaatttgcagccacactgccagcgcaatggtgctgtcgagaaccgcgcgaaaacccagacgcggatcgcttttggcgaccattttttccgcgctcaggtgagtcagcgtatccggcttttttgccaccggctggcgacacagttcgcagcacgcctgcggatgttcatcgctactggtcagcccatgaacgggctgcggctgctgctgttcatcgtcaacaaacaggcggccctgctcgtcaataaacttgatgcgcagatggcggctttccagcaactcccgggcagagggcgtcaggcgactgtccgcagggagatggatctctgcgccttcgctgagcgtatggttcgctcttagccatgcttcggtgatgaaatctttcatagggattgccagttagccggccaggcgacatacaggaatttcacgctggatgtcgtaccaaattcgatgctggagcctttcgggataaacatcacgtcgcctgctttggcgatcatggtttggccttcgtggcgaacatgcagctccccttccagcaccatgtcgatttcgtcgtagttcagggtccacgggaagaatgcgttctcccactgcataaaaccggcggccatgctgctgccgtcgtctccggtcacaagatcagtcaagcccacgcaatgcggctctgcgccgtcgaaacgaccaaacttgacgctactgccatcaatcactttgatgccgcctttgccggtcacgcttttgaagctcggctgcattgcgccctgctccaggctctgtttttccttcatcactttttccatcagctgtgcgaccaggctttcggtaaactggccttccggcagctgggcaatgatggtttcgcggatgcgctggctttcggttttgtcggctggcacgctggcgggcacggacgccgttaccgggatgctttcatcacattcggtgatggtaaaacccagtagatccgccacttcacgggcttccggggtaataatgctggcgcgcagaaccacggacattgcctgttcgccgcgcgcgtgtgcttcacgaatatcattcgctgtgatgagttttttcacctgcttcctcctgtttggtgagagatgccagataatccaccagttgctgcacgctttgcgggtcgtggctgtttagctcgaacatcggctcttcgaaacccgtctcaagcaataactttcgcgttgcggcgacgtcagcatctggcatgtccgttttactgatgacggcgatttgccgtttgctgacgccaatatccagcaacccggcaggcaaccgactttccgggtcatttgcgccatggacatagatcagcatgtctacatcctgtagcgtggtaattaaggcgtgataccagcggggatggttaaaatattcacccggcgtatcaatatcgcccttatcattaaattccacggcctgtgtttttctggcgagggtataattcccctgcaacgcattaaataacgttgtttttcctgccccgacgctacccacaaacgcaattcgtttcatgaatgcctcgtattaacttttggtcatttcacaaagcgtataatttaataagcgacctaaaccgctgacggtttgacttaacgcttcttctactgcgcccacgctgccataaatcaccaatgcaccgctgaatcggtcgagaaaaccgatatgcacatcagcggctttcagcgctaaatcaccggcgatcatcgccgtttcgccgggagttagcgtcataatgccaattgcgcccgcatccggaacgccgattttcttcgccagttcctcaccgggatgcgcgatgagatgcgccagtgtgacctgtttgccgggcacaaattcctgaatgatgcgttctttatccatgagtcgccgcctgtgaaaaactttcgtgtatcgtgacaatttttcgtcagagtaaataacaaaattcggcaagcgcgtttaaaaggtgaggtagatcactaagaatggagagatattcgctgtggtgcataaactttcatatgcaacgcatgaatataaataaaataatatcgagatattatatagactgcttttttttattattcgcaaactcagtaataagctttactaatatattgcagctaaactgcttaccctgaatattcagggtaagcgtgagagttaaaaaaaattacagcggttgggtttgcgcttctaccacggccagcgccaccatgttgacgatacgacgcacgcttgcgatcggcgttaacacgtgaaccggtttcgccacacccatcagcaccgggccgacagtcacaccttcgctgctggaaacacgcagtaagttgtaactaatgcgggcagcttccatgttcggcatcaccagaatattggcggaacctttcaaagagctgtccggcatacggtcgttgcgaatcgcttccaccagcgctgcatcgccgtgcatttcaccatcaatcatcagttctggtgcacgttccctgaccagttccagcgcctgacgcattttgctgctgctcgggcagtcagaagaaccaaagttggagtggctcaacaaagcaacgcgcggctcaataccaaaacgacggacagtttctgccgccatcaaggtgatctccgccagctcttctgcatccggttcatcattaacatatgtatcggcaataaaggtgttaccactcggcagcagcagcgcgttcatggcacctgcggtgtgaacgccatcgcgataaccaaagacatttttcaccacgctaaaatgttcatgataatcacccaccgtaccgcaaatcattgcatcggcttccccacgctgaaccatgatcgcgccgatcactgtcgggttactgatcagcgcccgctgcgcctgttcctgagtgacgccgcgacgcttcatgatctggaagtattcggtccagtactctttaaagcgcggatcggattcgttattgacgatctcaaaatcaacgcccgctttgatctgcaagcccagtttctgaatgcgcatttcgatcacgttcggacgaccgataaggatcggtttcgccagtcccagcgttaccagttcctgagtggcatgcagaacgcgcgcctcttccccttccggcagaacaacgcgcttcggcgctttgcgagcctgggagaaaatcggcttcataaacaggttggttttgtaaacgaactcagtcagcttgtcgatgtagacgtcgaaatcagcaatcggacgagtcgccacgccgctctccatcgcggctttagcgaccgcaggagcgatcttaacgatcaagcgcggatcaaacggctttggaatgatgtattccggaccaaagctcagatcctgatcgccatacgcactagccaccacttcgctctgttccgcatgggcgagttctgcaatcgcacgtaccgccgccagtttcatctcttcgttgatggcggttgcgccaacgtccagcgcgccacggaagatgaacgggaagcacaggacgttgttcacctggttcggatagtcagaacgaccggtgcaaatgatggcatccggacgcacttctttcgccagcggcggcagaatttccggttccgggttcgccagcgccaggatcattggcgcacgagccattttcttcaccatttcctgggtcagcactttcgggccggaacagcccaggaaaatatccgcgccttcaatcacatcatcgagggtacgtttgccgtcatccaccaccgcatatgcggctttggtttccgccatgtttggctcacggccctgatagataacgcctttactatcgcaaaccacgatgttatgtttttgcagacccagcgctaccagcaggttcatacaggcgattgctgcggcacccgcgccggaaaccaccatccgcacgtcggagatgtttttctccaccacgcgcaagccgttgaggatggcggcagtgctgataattgccgtgccgtgctgatcgtcgtggaataccggaatattcatccgctcgcgcagtttctgttcaatatagaaacattctggcgctttaatgtcttcgaggttgatgccgccgaaggttggttcgagcgcggcgacaacttcaataaatttgtccgggtcgagttcgtcaacttcaatgtcaaatacatcaatcccggcgaatttcttaaacagaacgcccttgccttccatcaccggtttgcctgccagcgcgccaatgttgcctaaccccagcaccgccgtaccgttagagatcaccgccaccaggttacctcgggcggtatatttgtaggcttttaacgggtctttttcgatttcaagacaaggtgcggcaacgcctggactgtaggccagcgccagatcgcgctgtgttgccagaggcttggttggagaaacctggattttccctggaactggaaattcatggaaatcaagtgcactttgttttaactggtcatccatttggttgttcctttcacgtaacgttcacaaataaagtgtgtgggcaacagcccctgcccacaacgtggcgcacattattaccctgccggagtctacagactttgagcaagtccaaactctcaccattaatataatgttttggtaataatcctataacactgatgttacctgcttaatccagcaataccatgcctgtctgctatgcttttttgatgcgtttagcgaaatttctcagaagtgtgaattaacgcactcatctaacactttacttttcaaggagtatttcctatgaacgagttagacggcatcaaacagttcaccactgtcgtggcagacagcggcgatattgagtccattcgccattatcatccccaggatgccaccaccaatcctagcctgttactcaaagctgccggattaagtcaatatgagcatttaatagacgatgctatcgcctggggtaaaaaaaatggcaagacccaggaacaacaggtggtcgcagcgtgtgacaaactggcggtcaatttcggtgctgaaatcctcaaaatcgtacccggtcgcgtgagtacagaagttgatgcacgcctctcttttgataaagaaaagagtattgagaaggcgcgccatctggtggacttgtatcagcaacaaggcgttgagaaaagtcgcattctgatcaagctggctagcacctgggaaggaattcgcgcggcagaagagctggaaaaagaaggtattaactgcaacctgacgctgctgttttcttttgcacaggcacgggcctgtgcggaagcaggcgtttttctgattagcccgtttgtcgggcgtatttatgactggtatcaggcacgcaagccgatggacccgtatgtggtggaagaagatccgggcgttaaaagcgtgcgcaatatctacgactactataagcaacaccactatgaaaccattgtgatgggcgcgagcttccgtcgcaccgaacaaatcctcgccttaaccggctgcgatcgactgactatcgcaccgaatttactgaaggagctgcaggaaaaagttagcccagtggtacgtaaattaatcccaccttctcagacgttcccacgcccagctcccatgagcgaagcggagttccgttgggagcacaatcaggatgcgatggcggtagaaaaactgtctgaaggcattcgtctgttcgccgttgatcaacgcaaactggaagatcttcttgccgccaaactataaaccagccacggagtgttatatgtcccgaaaagaccttgccaatgcgattcgcgcactcagtatggatgcggtacaaaaagccaactctggtcatcccggcgcgccgatgggcatggctgatattgccgaagtgctgtggaacgattttcttaaacataaccctaccgacccaacctggtatgatcgcgaccgctttattctttccaacggtcacgcgagcatgctgctctacagtttgctacatctgaccggttacgacctgccgctggaagaactgaagaacttccgtcagttgcatagcaaaaccccaggccacccggagattggctatacgccaggcgttgaaaccaccaccggcccgcttggacaaggtttggcgaacgccgtcgggctggcgatagcagagcgtacactggcggcgcagtttaaccagccagaccatgagatcgtcgatcacttcacctatgtgtttatgggcgacggctgcctgatggaaggtatttcccacgaagtctgtagcctggcaggcacgctgggactgggcaagctgattggtttttacgatcacaacggtatttccatcgacggtgaaacagaaggctggtttaccgacgatacggcaaaacgttttgaagcctatcactggcatgtgatccatgaaatcgacggtcacgatccgcaggcggtgaaggaagcgatccttgaagcgcaaagcgtgaaagataagccgagcctgattatctgccgtacggtgattggctttggtagcccgaataaagcaggtaaggaagaggcgcacggcgcaccactgggggaagaagaagtggcgctggcacggcaaaaactgggctggcaccatccgccatttgagatccctaaagagatttatcacgcctgggatgcccgtgaaaaaggcgaaaaagcgcagcagagctggaatgagaagtttgccgcctataaaaaggctcatccgcaactggcagaagagtttacccgacggatgagcggtggtttaccgaaggactgggagaaaacgactcagaaatatatcaatgagttacaggcaaatccggcgaaaatcgctacccgtaaggctagccaaaatacgcttaacgcttacgggccgatgctgcctgagttgctcggcggtagcgcggatctggctcccagcaacctgaccatctggaaaggttctgttagcctgaaggaagatccagcgggcaactacattcactacggggtgcgtgaatttggcatgaccgctatcgccaacggcatcgcgcaccacggcggctttgtgccgtataccgcgacgttcctgatgtttgttgaatacgcccgtaacgccgcgcggatggcggcactgatgaaagcgcggcagattatggtttatacccacgacagtattggcctgggcgaagatggtccgacgcaccaggctgttgagcaactggccagcctgcgcttaacgccaaatttcagcacctggcgaccgtgcgatcaggtggaagcggcggtgggctggaagctggcggttgagcgccacaacggaccgacggcactgatcctcagtaggcagaatctggcccaggtggaacgtacgccggatcaggttaaagagattgctcgtggcggttatgtgctgaaagacagcggcggtaagccagatattattctgattgccaccggtagtgagatggaaattaccctgcaagcggcagagaaattagcaggagaaggtcgcaatgtacgcgtagtttccctgcccagcaccgatattttcgacgcccaggatgaggaatatcgggagagcgtgttgccttctaacgttgcggctcgcgtggcggtggaagcaggtattgccgattactggtacaagtatgttggtctgaaaggggcaattgtcgggatgacgggttacggggaatctgctccggcggataagctgttcccgttctttggctttaccgccgagaatattgtggcaaaagcgcataaggtgctgggagtgaaaggtgcctgatggtgattgccggatgctgattgccggatgcgacgctgacgcgtcttatccggcctacagcgtcttatccggcctacatgtcccgccattttgtttaacgggtgatccacaacgtgggccaggcgtctggcccatgccagttatcgcaggtgggttctgcggcgtaacgcaccaggcgaaaacgctgaccgtcaaagcgccagcgcgcctgaatgccacaatcgcttaatccgcgccctttcgctaaggtcaccagttcacggcttttctcatcaaatgttgcgttcatcagttccagttcattcgtctcctgaccgttgttgaacggcaaacgcaaccgaaccgggcggctagctagtggctttttacggctcacaatccatgccaaatcaatggtgttataggcccctgcctcacagctaatcatcatcagcgctttatcatcagtcagcgcagtgacattcacctcacgacgcaatggatcaaggctgcagcgcagaccattcatccgccagtttccataatccagcaaatcgttgcgttcttcgagactgagtggcgtcggcgttgggttaaccaccgcgacctctttcagcgcaggcgcgggcggtacgctgagcggcggttcgtcccctttcttgatccacgcggtttcactgccaacgcgcttttgctgagcatcaataaacaacaacgctgcttttaagccactcagagaaatggtctgatcgccatcgcgtaaggtgattgccttcccttcctgaatcatctgcaaaaacgcggtgatggttgccgtatcatcggttactaataaccatggactaatccgccacttgtcaccacttaacgccaacggctcgccatctaacagcagccgtggcgctatctccccttcactcgcctccgggctcttcaatccgccgcgctcaatacgtaaaacggcatcggtatgcgccccggcgctgcggctcagggtcatcaccagtccattatgatcgcccgtattacgcgccacgcagaaattttggttattacaggtgacctgccagtcggaaaacgcccgttgcgctggtgccgcccacaccaaagacgtcggcaacaaagcgaaaaaaaagagaaggaaaatgcgatagcgcatggacggtacgaccccagaagttcaaacaaacagcacaagtcgtatcttcgttgcgcaggtagcgcggctcaatcggatttgtcggattgagccaataataaacaacgaaatattattgttatttttcagtccattaaatgactcgtttgcaaatagttaagcaataacaccgtcttaccgtcacgtatctcgccggttttgatcatctccagcgcctggctgaacggcagctcgagcacttcaatatcttcatcttcgacaccgccaccggcgttagcgcgctgattgtcactgtattcggcgataaaaaagtggattagctcagtcacaccgcctgggctcatatacagttcaaataatttgcgcacttcacccacttcatagcccgtctcttcaatcgcttctttgcgaatacacacttccggttcgtcgttatccagcagcccggcgcagctttcaatcagctgcccgctttcattgccattaacccaggtagcgacacggaactgacgaatcagaaccacggtctttttcttcgtgttgtacaggaggatcgtcgcaccattgccgcgatcgtacacttcacgtttatggcggataacttcgccgtctttgcgcgtgagatcgtaagtaatgttgtgcagggtgaaatagttatcggagagaattttgtctttaatgagggtgatttgttgcgtcataccgactccacagcgcgaaatgaacaattatcttacgctgtgaagtcgggtttgtctgcgcaggctatcagtgagatttgacactttttacccccagccagtcaataatcccctgtgccgcatgacgtccttctgccattgcggtaaccaccagatccgcaccacgcacggcgtcaccaccagcgaagattttcggattggtggtctggtaacggtactggctttccacatccgcgatgatgcggccccatttgtctaccgttacaccgtggctctccagccacggcatcccgtgcggattgaagccaaacgccataatcaccgcgtcggctggcatgacaaattcactgccttccaccggcactggacgccgacgcccctgggcatccggctctccaagacgcgtgcgcaggaaacgaatcccgcagacgtgaccttgttcattcagctcaagcgccaccggctggacgttaaattcgaagttggccccctcttcgcgggcgttcttcacttctttcttgctgcctggcatgttagcttcatcacgacgataagcgcaggtgacgttactcgcgccgtggcgcagtgcggtacgcacacagtccatcgcggtgtcgccgccgcccagtaccacgacgttaagtccggcggtattgataaacggctcttccggtagctcttcgagccccatcacctgtttagtgttggcaatgaggaacggcagcgcgtcataaacgcccggcgcatcttcattgggtaaacccgctttcatggaacggtaagtgcctacgccaacgaagaccgcgtcgtattgttccaaaaggctatccaaagagacatctttacccacttcacaattgagttcgaagtgaatccccatcgcgctgaagatttcccgacggcgtgccagcagggatttatccagtttgaaagaaggaatgccgaaagtgagcaagccaccgatttctggatggcgatcgtacaccgtcacccccacgccattgcgggtcagaacatccgcacaggccagccctgccggacctgcaccgataatcgccacccgcttgtccactttggtgacatggcttaagtcaggacgccaacctttcgccaacgcctgatcactaatgtagcgttcaatgttgccgatagttaccgcgccgtgctcatcgcgaatagtacaggcaccttcacacaaacggtcttgcggacaaacgcgtccggtaatttccggcagggtgttggtctggtgagaaagctcgacggcggcgtcgatgtttccggctttcaccagttcaatccactgcggtatatggttatgcagcgggcaggtccattcacaaacgctgtgctcgccgcacttaaggcagcggctggcttcccgttgtgcctggtcggcgcgaaatggcagataaatttcatcaaaaccggttttgcgcgcttcaatcgccagtttatccggctcgccacgcgcgggcgttgcctgcatttgttcgactttactcattaccggcatttcttgcgccgcggtactggcatgccacggttgatgttcctgacgcgcggtgcgcaagcggcgggatttcgccatgccggagagtgcgacgtcagtgaccagttgcagcgcgtccgccgggcaattctcaacacaggcaggaccgttttcgcgccccgcacaaaggtcgcatttatgcgccgtggcttttacttttcctgccgcgacgggtgtcaggacgatttgcatcgtaccaaaaggacaggccaccacgcaggatttacagccaatacacttttgctgattgacctgaatgctgtcatcaacgtggctgattgcgccattagggcagctacgggcgcagggcgcatcttcacaatggtgacaggtcactgcactacgttgctgttgatgtttgataaccgtaattcggggatgaaaatggtgttggctcaggacatgttgctcatcattgtgagccatgacacaggcgatttcacaagcatgacaacccagacattgctgactgttggccataataaaacgattcataacgaccttcttttttggttgtaaaaaccttattctttatatgagtgttgttattacccgacttacaggggaatcggcaatgttcatgtgcccagaataagtaactatttcgctataaactgtggcagatcaaataatcccatcactgactaaattgcgtttcagcgaactggaacattaatgattttttgtggagaagacgcgtgtgattgttaaacgacccgtcagcgccagtctggcccgggcctttttttacattgtgctgctgagcattctttccacgggtatcgctctgctaactctggcgagcagtttgcgcgacgctgaggctatcaatattgccggaagcctgcgtatgcagagttaccgcctgggctacgacttgcaaagtggcagtccacaactcaatgcacatcgccagttatttcagcaggcactgcatagtccggtattaaccaacctcaacgtctggtatgtgccagaagcagtaaaaactcgctatgcgcatctgaatgccaactggctggagatgaataatcggctcagcaagggcgatttgccgtggtatcaggccaatattaataattatgttaatcagatagacctgttcgtactggctttacagcactacgctgaacgcaaaatgctgctggtggtggcgatttccctggctggcggcatcggtattttcacgctggtcttttttactttgcgccgcatacgccatcaggtggttgccccgctgaatcagctggttaccgccagtcagcgtattgaacacgggcagttcgacagcccgccgctggataccaacctgccgaatgagcttggtctgcttgcaaaaacctttaaccagatgagcagcgagctgcataaattgtaccgtagcctggaagcgagtgtagaagaaaagacccgcgatctccacgaggccaagcgtcgtctggaggtgttgtatcagtgtagccaggcgctgaacactagccagattgatgtgcattgtttccgccatattttgcagattgttcgcgacaatgaagcggctgaatatctggagttaaatgtcggtgaaaactggcggattagcgaagggcaaccaaacccggaattgccgatgcagattttaccggtgacaatgcaagagacggtttacggcgaactgcactggcaaaatagtcacgttagtagtagtgaaccgctgcttaacagcgttagcagcatgctgggacgcggtttgtactttaatcaggcgcagaagcattttcagcaattattgttgatggaagaacgtgcgaccatcgcccgcgaattgcacgacagcctggctcaggtactttcttacttacgtatccagttgacgttactgaagcgtagcataccggaagataacgccaccgcacaaagtatcatggccgatttttcccaggcgttgaatgatgcttatcggcagttacgcgagctgttgactactttccgcctgacgctgcagcaggcggatctcccctccgcattgagggaaatgctggatacgttacaaaatcaaaccagcgccaaactgaccctcgactgccgtctgccaaccctggcactggatgcgcaaatgcaggtgcatttgttgcaaattattcgcgaagcggtgctgaatgcgatgaagcacgccaacgccagcgaaatcgccgtcagttgcgtcaccgcgccggacggcaatcacacggtttatatccgtgataacgggattggtatcggtgaaccgaaagaacccgaaggtcattatggtctgaatatcatgcgcgaacgcgcggaacggctaggtgggacgctgacttttagtcaaccttccggcggcggcacgttagtgagtattagctttcgctctgcggagggtgaggaaagtcagttaatgtaatgcctcctactgaccaaagaatacttgcacttaaggttcagtataaaagggcatgataatttacattaactcctttttttctccacgattggctcgtaccttgccgctacagtgaagcaagtcaagcctacaacgatacgcagaaacacgaggtcctcttttaatggcgaatttctttattgatcgccccatttttgcctgggtgctggcaatcctgttgtgtctgacaggtaccctggcgatttttagtttgcccgttgaacaataccccgatctcgcgccaccgaatgtgcgagtgaccgctaactatcccggcgcaagcgcccagacgctggaaaacaccgtgacccaggttatcgagcaaaatatgaccggcctcgataatctcatgtatatgagttctcagagcagtggcaccggtcaggcatctgtcactttaagttttaaagcaggcaccgatccggacgaagccgtgcagcaagtacaaaaccagctgcaaagtgccatgcgaaagttaccgcaggcggtgcaaaatcagggcgtgacggtgcgtaaaaccggcgataccaacattctgaccattgccttcgtctctaccgatggtagcatggataaacaggatattgctgattatgttgccagtaatattcaggacccgttaagccgcgtgaatggcgtcggggatatcgatgcctatggtagccaatattccatgcgtatctggctggacccggcgaaactcaacagtttccagatgacggctaaagatgtcactgatgccattgagagtcagaacgcgcagattgcggttgggcaacttggtggtacaccttccgtcgataagcaggcgctcaacgccaccattaacgcccagagtctgctgcaaacaccagaacagttccgcgatatcaccttgcgggtcaatcaggacggcagtgaggtaaggctgggcgatgtcgccaccgtcgaaatgggggcggagaaatacgattatcttagccgcttcaatggtaagccagcctccgggctgggggtaaaactggcctccggcgctaacgaaatggcgacagcggagctggtgctcaatcgtctcgacgagctggcgcagtatttcccgcatggactggaatacaaggtggcgtatgaaaccaccagctttgttaaagcctccattgaagacgtggtgaaaacgctgctggaagctatcgctctggttttcctcgttatgtatctgttcctgcaaaacttccgcgccacgctgatacccactatcgccgtgccggtggtgttgatgggaaccttctccgtactttacgccttcggttacagcgtcaacaccttaaccatgttcgcgatggtgctggcgatcggtctgctggtggatgacgccatcgtggtggtggaaaacgtcgaacgtattatgagtgaggaaggactcactcctcgcgaagccacacgtaaaagcatggggcagatccagggggcactggtcgggattgcgatggttcttagcgcggtatttgtaccaatggccttcttcggcggcaccaccggtgccatctatcgccagttctctattaccattgttgcggcgatggtgctgagtgtactggtagcgatgatcctcactccggctctgtgtgccacactacttaagccactgaaaaaaggtgagcatcatgggcaaaaaggcttttttgcctggtttaaccagatgtttaaccgcaacgccgaacgctacgaaaaaggggtggcgaaaattctccaccgtagcctgcgctggattgtgatttatgtcctgctgcttggcggcatggtgttcctgttcctgcgtttgccgacgagcttcttaccgctggaagaccgtggcatgtttactaccagcgtacagttgcccagcggtagtacgcaacaacagaccctgaaagtcgttgagcaaatcgagaaatactacttcacccatgaaaaagacaacatcatgagcgtgtttgccaccgttggttctggccctgggggtaacgggcaaaacgtggcgcgaatgtttatccgcctgaaagactggagcgaacgcgacagtaagaccggcaccagctttgccattatcgagcgtgcaacgaaggcgtttaaccaaattaaagaagctcgcgttatcgccagcagcccgccagcaattagcggtcttggtagttctgcaggttttgatatggagttgcaggaccacgctggagcgggtcacgatgcgctgatggcagcacgtaatcagttgctggcgctggcggcggaaaacccggagctaacccgtgtgcgccataacggcctcgacgacagtccgcagttgcagattgatatcgaccagcgtaaagctcaggcgctgggcgttgctatcgacgatattaacgacacactgcaaaccgcctggggtagcagctatgtgaatgactttatggatcgcggtcgcgtgaagaaagtctatgtgcaggcagctgcgccgtatcgcatgctgccagatgacatcaatctctggtatgtccgaaataaagatggcggcatggtgcccttctctgctttcgcgaccagtcgctgggaaacaggcagcccgcgtctggaacgctataacggttattctgcggttgagattgttggggaagccgcaccgggggtcagtaccggtacggcgatggatattatggaaagcttagtgaagcagctgccaaacggctttggtctggagtggacggcgatgagctatcaggagcggctttccggcgcgcaggctccggcgctgtacgccatttccttgctggtggtattcctgtgtctggctgcgttgtatgaaagctggagcgtgccgttcagcgtaatgctggtcgtgccgctgggggtaatcggcgcgctgctggcaacctggatgcgcgggctggaaaacgacgtttacttccaggtgggcctgttaacggtcattggtttaagcgcgaaaaacgccatcctgatcgtcgagtttgctaacgagatgaaccaaaaaggccacgacctgtttgaagcgacgctccacgcctgccgtcagcgtttacgcccgattctgatgaccagcctggcatttatcttcggcgtattgccaatggcaaccagcacgggtgccggttccggtggtcagcatgcggtgggtactggcgtaatgggcgggatgattagcgccactattctggctatttacttcgtgccgctgttctttgtgctggtgcgccgccgcttcccgctgaagccgcgcccggaataagcaataaaaaaggcgacatgccaatgtgtcgcctttttcaactttccgattaagaacctgctcagcgggttcttgctgtttgtactttgtctcaggaattacttacgaagcataacttcgataaagtctttccagttccccagttcacgttcaatcataacaacctctcttataattatgggtattctacggaaacaatataccgtggtgaagctaatttactcgattgctgcgatgactacctccgggggacaaatcttatgtaaatactatggtcctgcggtgatgatttgtatgtgatacacagcaacatttcgagatattcatacggcatctaatactgatttaattctggttaaaatacagacagataacaagatgaatattcttaatgtttacgttaaaaatgtttaatattatttaatagttgttaatttgaatacttcgataatgttatatttcctgataatcatttgcaggcaaaatgttttcacccttaaatgagtatttattctcataaatcgaaaaaggattcattatggttacactttacggtatcaaaaattgtgacaccattaaaaaggctcgccgttggctggaagccaataacatcgactatcgttttcatgattaccgcgtcgatgggctggacagcgaattattgaacgattttatcaacgaattaggctgggaagcgttactcaacacccgtggtacaacctggcgtaaactggacgaaaccacccgcaataaaatcaccgatgcggcctctgcggcggcattaatgactgaaatgcctgcaattatcaaacgtccattgctctgcgtgcccggtaagcctatgctgctgggtttcagtgattccagttatcagcaatttttccatgaggtgtaatctatgagctgcccggttattgagctgacacaacagcttattcgccgcccttccctgagtcctgatgatgcaggatgccaggctttgttgattgaacgtttgcaggcgatcggttttaccgttgaacgcatggactttgccgatacgcagaatttttgggcatggcgtgggcagggtgaaacgttagcctttgccgggcataccgacgtggtgccgcctggcgacgccgatcgttggatcaatcccccgtttgaacccaccattcgtgacggcatgttattcgggcgcggtgcggcagatatgaaaggcagcctggcggcgatggtggtggcggcagaacgttttgtcgcacaacatcccaaccatacggggcgactggcatttctgatcacctctgatgaagaagccagtgcccacaacggtacggtaaaagtcgtcgaagcgttaatggcacgtaatgagcgtctcgattactgcctggttggcgaaccgagcagtatcgaagtggtaggtgatgtggtgaaaaatggtcgtcgcggaagtttaacctgcaaccttaccattcatggcgttcaggggcatgttgcctacccacatctggctgacaatccggtacatcgcgcagcacctttccttaatgaattagtggctattgagtgggatcagggcaatgaattcttcccggcgaccagtatgcagattgccaatattcaggcgggaacgggcagtaacaacgttattccgggtgaactgtttgtgcagtttaacttccgcttcagcaccgaactgactgatgagatgatcaaagcgcaggtgcttgccctgcttgaaaaacatcaactgcgctatacggtggattggtggctttccgggcagccatttttgaccgcgcgcggtaaactggtggatgcggtcgttaacgcggttgagcactataatgaaattaaaccgcagctactgaccacaggcggaacgtccgacgggcgctttattgcccgcatgggggcgcaggtggtggaactcgggccggtcaatgccactattcataaaattaatgaatgtgtgaacgctgccgacctgcagctacttgcccgtatgtatcaacgtatcatggaacagctcgtcgcctgatgagtggttctgcaagaggaaataagcatggactggctggctaaatattggtggattctggtgattgtctttttggtaggcgtcctgctgaacgtgattaaagatctcaagcgcgtcgaccataagaaatttctcgccaacaagccggagcttcccccgcatcgtgatttcaacgataagtgggacgatgacgacgactggccgaaaaaggatcaaccgaagaagtaagctgagtgctcaaccgtaggccggataaggcgttaacgccgcatccggcaatggtgaacgatgcctgatgcgacgctcacgcgtcttatcaggccaggtaatctgtcttttacatcatttcaatcacatcatcatcgccaggcttaccgccacttagcgcttcgtcgaaataatgtttcggaatggtataacgcaagtgatccagggcaaattgcatactgcgattgtcgatcgcatggcctaaatcctccacgatatccagcgtcacgtcaccaccggcactgattaacgcttcctgcgccgcaaccgcatgcgccagatcgataaccggatcttcaccgccatgaatcaggtgaattgtcgtggctgtagacgcagtttccggcaggctcgcatagcgtccgttaaaagcaatgacgcgactagcaaggcccggttcggctttaatgctctccagcaccataatcgcgccttgagagaaaccgatgagcgccgtggcgttagcccctactccgctctgtttctgccagtagcgcaccgtttcaataaacgtcggcatgatcgcatccacacgcgcctggcgattatcttccgtaataccctgcacgctaaaccactgacgccccgccggattaccgctcggctccgcgccaccgacactcaccaccagcgcatcaggaaacagcggtgcaaaccagttgcctatttcccccattgccaccgggttatccccgacaccgtggaaaagcagtaacaactgttgcgcaggtttatccgggctttgaacaacaaaatggtcatgtttcatggcgaactccttaactgatgtcattaattttacgccgctgactcacaatgaccatgagataaaattgaaggagtcagtgaaataattgccattgcgttatgcgatcgcgcagacgctcagtgcgaacatcattaagtgcgaacagcgcctgcgcggcctcttcccgctgacggaccagtaacatcttgcggccactaagtttaagtgtggtacataactgcgcatcactggcgtttttctgtaaacgcccacgcagcgccggtaatgccagttcactggtttgtaacagacgcaataagcaacctaagctcgttaatagcggacgatgagcgaaagcaaaaccggccagttcaagccagtcgtcgtcagaaaggacggcatcgtttagtggatcaacaggaagcgtttcgccattccactgcgcgagagcttgcgcatcgcgacgtaaacggtaatgctcacgttcagccagctgtttacccgcatcactcatcggtaacagcgccatcgccgtatagcaaccgctgctggcttcccgatgattacccatccgcaccagcacaaaaccgcagcgttgccagaaacgccataactccccggtgtaaccaaaactcacgctaagatagtcgaggtcttgcgtatattgcaaagcaccagcaataagttgccgccctgtgccttcccgctgacgagccggatgaactgctatccggctgacccgccgtccacgcaatgtcgccgccagtggattgttgccgtgcgccgccaggctctgggccaccagattaccccgcgggcgacgaaaacctgcccataccgcctgactgagttgttgagataatccaccctcatccaccagccacagcgccccggcaatctcgttttcgccagccgcctgtaaaaaatgttgccctggtgcatccatcatccggcgtaaatccagcgggctagtccgatagtgcgcaccagacaagagctgataaacctttaacggcgtttctggatcgctttgccataacgtctgttcaaatgcggaaatgacaatattgccttgtggtgtatgggtgaagttttcatcgtcaaaaaccagtgcctcgctgaccattttttccagcgggcatccctgcgcccagcggatcggctgttgcagttcaaaacggtgtaaatgcggaaagcgagcgcaaaatttcagcaaaaaaccacgtccggtgccttcgtagccctgcaccgtagtggttaacaacgttcgaggaaaacggcttaccagttgatgcaacaatggcgcaggtatggctgcggcttcatcgaccaccagccagtcggcttgctcatcgctggctaacaaggcatccggcgcaataaagcgaaacttctcgcccgcaaattgtgccagtacatccgtactcgcttttgcgggcgcggtgacaatcgctctgcccgcaatacgagaaatgagttgccctgccaacgcgctcttaccgcgcccacgcgcagccgttaccgctgccacgcccggcggcatggtcattagctgctttaagagttgctgttgttctggttgtggtgcgccagtcgcggggtaccagtcagtacggggagtaaaatgcgccaagctgaatggctggttttgccgccagaggatagcctcgttatccgccgtaagtacgcgtttgagatgctggacaaaatgcggcgtcgcaatagggtcagggcaatcactccagcgcaggctgtcggcatcaggttggttttcccactcttcccatacagggagtaacaaaaccagccagcttcccgctttcaacgttccgctaagtgcggcaaaggcagcggcatcaaagccgtggcgggcgtcgaataccgcatgccggaactcgcgcccaagtaaagtttgtagtgcgctgggagaacagtggttttcagcatctggccgcgggctaatccacagccagtcgccaggtaaggcatcacgcaacttaagagtatgctcaaaacaccaaccctcttccccgctcaacaccagcaagcggcggatcccttcacgtttcatttgcgctgttaatgtgtgaagcgcagtcagttcagccatccctgccccggaagttaaatgcttttaccaaaagtattgcattgtgccggatcgccgctgtcgaaaccacgtttaaaccagctgtagcgttgctgagaagtgccatgagtgaaactgtctggtactactcgcccctgactttgctgttgtaaacggtcatcgccgatggcctgcgccgcgttcagcgcctcttccagatcgccggtttccagaacgccttgctgctgcatactatgcccccagacaccggcaaaacagtcggcctggagttccatacgcacagataagcggtttacttccgcctgcgtcgcgttttgttgcagttgacgaactttcggctcgatgcctaacagtttctgcacatgatgaccgacttcatgggcgataacgtacccctgggcaaaatcgccatccgcgccaagtttgtctttcatgtcatcatagaaggagagatcgatataaaccgtgccatccgccgggcaatagaacggccccattatggactggcccgccccgcagccggtacgcgtcattccacggtacatgaccagcttcggttgctgataggtcttacccatcttctcgaactgttgtccccaggtgtcttccgtggttgccagaatcacgctggtgaattttgcggcttcgtcttcatttgggctaatactccgcgtactttgttgttgggaaaccggctgcccggtcatcaacccggttaaatcaacaccatagtagcctgcaaccagcacgactatcagtaaaatcagcccgcctttaccgcttggcaggcgaaaaccgggaccgcccatagatggaccaccagagctgttgcgcctgtcttcaacattgtcactttcacgtcgcccttgccaacgcatagatacctcaacaatatattcattatagaaatgatcgtaggtggttcagaggaagattaccacaggaaagcgggatgaaatggcggaggaatgagcgttcaatgcatatattccgagagcggttgtcttgccgtgccagctgcacggcaagatgatgaacagaaaaatcagtccagctgtacacccaggcggcgggcgacggcttcataggcttcgatcaggccaccgaggctctggcggaaacggtctttgtccattttctccagcgtttctttgtcccacaggcggctaccgtccggggagaactcatcacccagtaccacttcgcctttgtacagaccaaattccagcttgaagtcgaccagaatcagaccagcatcatcgaacagttttttcagcacgtcgttcgctttgtaggtcagctctttcatacgcgccaggttctctttgctcacccagccaaaggtttcgcagtaagattcgttgaccatcggatcgtgcatggcgtcgtttttcaggaacagatcgaacagcggcgggttcagctcaataccttcttcgattccaagacgtttcaccagagagccagcagcacggttacgcacgacacactcaaccggcaccatatccagctttttcaccagacattcggtatcggagagcagacgctccatttgagtcgggatacccgcttcagccagtttgctcataatgaagtagttgaacttgttgttcaccatacctttgcgatcaaactgctcaatgcgcgcgccatcccctgcactcgtatcattgcggaattcgagcaccaacaggtccgggttttccgtgctgtatacggttttcgctttaccacgatacaactcagcttgcttttgcatctttatcactcctgggtgtgaattaacgttttaaaatcttttgctgtctggtgtgccggatgttttgtcggatgcggcgtgaacgccttatccgaactacgtccgacaaacaaatttcgtgcgaattaccgctaaaatcgcgttttcctgcagacgcacacgtttgcgtatcatatcagaaaaaagggccggatgattccagccctgtatttttacttgctaaacgcagcctggaagacagctaccagcgcgtcgttctgactctgagtcagagtatgacctttcggatcgatgaactgtaggctgctgcggttatctaaatcgccaacctgcagtttatagtcaccggatgccaggcctggatcgctcgcgcccagttcctgccagtcgctgtcagacagcggcttataagttacggccatgttgccctggctacgggtgctgtcggtcactttcatgcccactttttccagcgccgctggcagacgttgccaaaccacattgaacggcccgcgtacgaccagcattggtaaaccggtgtcatcagctgcactttgtacgtccatagtggtggaggcacgattttgcgcagcgttcgcggcgtcagtggcagatttatccagaccggcggaaataacgttcatcatctccgtgctgtaacgctgcatggaagccgcgtctgcaaccggtttgcccgcctgttccaggttcagcagtttaaccgtaaccgcctgctgataaccctgcggcttaacagagatttgataacgaccacgatactgctcgtcttcgtccagacggttccattgtacccaatcggtggtcagtgtctgaccagcatcatcacgttgggtgatggtgtagtttttcgcctgcagcacgctaaccacctgcggccacagagtattgccacgaccattttccaccagcaaactagcggtatcgcccgtgaactgggtacgcgcgccagaaaccagtgccagcggctgggctggtggacgaatgtccagcgccttaccgacagcaccactaccgttggtcaccgggattgcataatcaccggaggtcaccggcaaaatcattccagccggggcatgaagctccgcaagcggtgccgcttccaggtaggcttcatcaccactgacctgacgcttatagcgactgtcagaactacaggcagcgagtaataaaacaaggctaacacccgcaacctttgccaggcggctcttttgaacagagtaagccatcaaatctccctaaactttacagcaaaccggcatgcttaagcgccgctctgaccgtctcacgaccactgtcggtgattggtgtcattggcaggcgcagcgtatcggtcgccacaagacccagttccttacatgcccatttcaccgggattggattgggttcgacaaatagtttgttgtgtaatggcatcagacgctgattaataacgcgtgcctcggcaaaatgcccttctgctgccagtttgcacatctgggccatatcacgcgctgcgacgttagccgtaacggaaataaccccatgaccgcccaattgcatgaagtccagcgcgctcgcatcatcgccgctcagcagaacaaaatcatcactaaccagctctttgatctggtttacacgcgttaagttccctgttgcctctttgattccgataatattttttactttcgccagacggcccaccgtttccgggagcagatcgcagccagtacgggacggcacattatacagaatttgcggcaggtcagtatgctcagcgatggctttgaaatgctgatacaaaccttcttggctcggacgattgtagtaaggggttaccgtcaggcagccgacgataccactgtcattgaagcgctgcgtcaggctaatggcttccgcagtagcgttagcgccggtcccggcaattaccggaatgcgcccatcagccagatccagcgtcatcatcaccacatcagcatgttcgtcatgatttaaggtagcggactcgccagtggtgccaacagaaacgatcgcgctagtaccgctggcgacatgataatcaatcagttttttcaagctagcccgacagacattacctttttcatccatcggagtaacaatcgcgacaatacttcccgtgaacatgggccatcctctgtgcaaacaagtgtctcaatggtacgtttggtatggcattaaaagcaagcagacagaaccgttctgattgttgtatgcatgttttttttatgctttccttaagaacaactcaccccttaaaggaataaccagtttgacactgagtagccaacattatctggtgatcactgcgttgggtgccgatcgccctggaattgtgaacaccatcacccgtcatgtcagtagttgcggctgtaatattgaagacagtcgcctggcgatgctgggagaagagttcacgtttattatgctgctttccggtagttggaatgccattactctgattgaaagtacgttaccgttgaaaggtgccgaactggatcttttaatcgtgatgaagcgcacgacggcgcgtccgcgtccgccaatgccagcatctgtctgggttcaggtcgatgtggcagactccccgcatttaattgaacgcttcacagcacttttcgacgcgcatcatatgaacattgcggagctggtgagccgcacgcaacctgctgaaaatgaacgggctgcgcagttgcatattcagataaccgcccacagccccgcatctgcggacgcagcaaatattgagcaagcgttcaaagccctatgtacagaactcaatgcacaaggcagtattaacgtcgtcaattattcccaacatgatgaacaggatggagttaagtaatgaatccactgaaagccggtgatatcgcaccgaaatttagcttgccggatcaagacggagaacaagttaatttgaccgacttccagggacagcgtgttctggtttatttctacccgaaagccatgacccccggctgtaccgtacaggcctgcggcttacgcgataacatggatgagttgaaaaaagcgggcgttgatgtgctgggtatcagcaccgataaacccgaaaaactctcccgttttgcggaaaaagagctgcttaactttacgctcctgtctgatgaggaccaccaggtgtgcgaacaattcggcgtctggggtgaaaagtccttcatgggcaaaacctacgatggcattcatcgcatcagcttcctgattgacgctgatggcaaaatcgaacatgtctttgacgatttcaaaaccagcaatcaccacgacgttgtgctgaactggctgaaagaacacgcctgattactttgctccattccgtgctggctgcgcttgcggccagcatacctcacttctcgtgatcaagatcacattctcgctttcccctgcgacacgggtgtcgaatccattttttgctgaacgttaatgaccatcatttttgtaccgttcagaatccagttaatacataacttattgaatatattgagttaatcagaatggcatcctttatgcaatatgaaatgcaatgtttcatatcattttcaaggagccgacatgaaccgctttgtggtggccgaaccactgtggtgtacaggatgtaatacctgtctcgctgcctgtagcgacgtgcataaaacgcaaggtttacagcaacacccgcgcctggccctggcgaagacgagtacaatcactgcccctgtcgtgtgtcatcactgtgaggaagccccttgcctgcaggtctgcccggtcaatgccatctctcagagggatgatgcgatccaactcaacgaaagcctctgtattggctgcaagctttgcgccgtggtctgcccatttggcgcaatcagcgctagtggaagccgtccggtgaatgcccatgcgcaatatgtttttcaggctgaaggcagtctcaaagacggcgaagaaaacgcgccaacacaacatgctttgctgcgctgggaacctggtgtccagaccgtcgcggtgaaatgcgacctgtgtgatttcttgccagaaggtccggcctgcgttcgcgcttgcccgaatcaggcgttacggctgatcaccggtgatagcctgcaacgtcagatgaaagaaaaacagcgccttgccgcaagctggtttgccaatggcggggaggatcccctttccctcactcaggagcaacgctaatggatgccctgcaattattaacctggagcctgattctctatctgtttgctagtctggctagcctgtttttactcggtctggacagactggctattaagctttccggcatcacaagcctggtgggcggcgtgattggcatcatcagcggaattacgcaattacatgctggtgtaactttagtcgcccgttttgcccccccttttgaatttgccgatttaaccctgcgaatggatagcctcagcgcatttatggtgctggttatctccttgctggtggtggtttgttctctctatagtttgacttatatgcgcgaatacgagggcaaaggcgcggcggcgatgggcttctttatgaatattttcatcgcaagcatggttgccctgctggtgatggacaacgctttttggttcatcgtgctgtttgaaatgatgagcctgtcttcctggtttctggtcattgccaggcaggataaaacgagcatcaacgctggcatgctctacttttttatcgcccacgccggaagcgtgctgataatgatcgccttcttgctgatggggcgcgaaagcggcagcctcgattttgccagtttccgcacgcttagtctttctccggggctggcgagcgcggtgttcctgctggcctttttcggttttggcgcgaaagccgggatgatgccgttgcacagctggttgccgcgcgctcaccctgccgcaccaagccacgctagcgcgttgatgtctggcgtaatggtcaaaataggtattttcggcatcctgaaagtagcgatggatctgctggcgcaaacgggtttgcctctgtggtggggcattctggtgatggcgatcggcgcaatctccgcgctcctgggcgtgctatatgcgctggcggaacaggatatcaaacggctgctggcctggagtaccgtcgaaaacgtcggcattattttgctggcagtcggtgtggcgatggtcggtctgagtctgcacgacccgctgctcaccgtggttggactgctcggcgcactgtttcatctgctcaaccatgcgctgttcaaagggctgctatttctcggcgcgggagcgattattagccgtttgcatacccacgacatggaaaaaatgggggcactagcgaaacggatgccgtggacagccgcagcatgcctgattggttgcctcgcgataagcgccattcctccgctgaatggttttatcagcgaatggtacacctggcagagcctgttcagtctaagtcgtgtggaagccgtagcgctacaacttgcgggtcctattgctatggtaatgctggcagtcactggtgggctggcagtaatgtgcttcgtaaaaatgtacggtattactttctgtggtgcgccgcgcagtacacacgctgaagaggcacaggaagtgccaaatacgatgatcgtcgccatgctactgctcgcggcactctgcgtattaattgcgcttagtgccagttggctggcaccgaagataatgcatattgcccatgcgtttaccaatacccctcccgccactgtcgccagcggaatagcacttgtacccggcacgtttcatacacaggtcacccccagtttactgttgctgttactactggcgatgcctttgctgcctggcctttactggctgtggtgtcgtagccgccgcgcagcgtttcgtcgcacaggagatgcctgggcatgcggctacggctgggaaaatgcgatggccccgagtggcaatggcgtgatgcagccgctgcgtgtggtcttttctgcgctatttcgtctacgacaacagctcgaccctacgctgaggctaaataaaggtcttgcgcacgtcaccgccagggctcagagcacagaacccttctgggatgagcgggtgatccgccccatcgtgagcgccacccaacggctggccaaagaaatacagcatctgcaaagcggcgactttcgtctctattgcctgtatgtggtcgccgcactggttgtgctgctaatcgctattgccgtctaaggaaatcaccatgagacaaactctttgcgacggatatctggtcatttttgcgttagcacaggccgtgattctgctgatgctaaccccactttttacgggtatttcccggcagatacgcgcgcgtatgcactcccgccgcgggccggggatctggcaggattatcgcgatatccacaaactgtttaaacgccaggaagttgcgccgacatctagtggtctgatgttccgcctgatgccgtgggtattaatcagcagcatgctggtgctggcgatggccttaccactgtttattaccgtttccccttttgcgggcggcggcgatctgatcacccttatctatcttcttgccctgtttcgttttttctttgctctttccgggctggataccggaagtccgtttgcgggagtcggtgccagtcgcgagttgacgctcggcattctggtcgaaccaatgcttattctcagtctgctggtattggcgctgatagcaggttccacgcatatcgagatgatcagcaatacgctggcgatgggctggaacagcccgctaaccaccgtactggcgttactggcctgtggttttgcctgcttcattgagatgggaaaaattccctttgatgttgctgaagcagaacaggaattacaggaaggcccgctgaccgaatattccggtgccgggctggcgctagcgaaatgggggctggggctgaaacaggtcgtgatggcaagtctgtttgtggccctgtttctgccctttgggcgcgcgcaagaactttctctcgcctgcctgctgactagtcttgtcgttacgctgctcaaggttttgctgatttttgtactggccagtatcgcagaaaacacgctggcacgcgggcgttttttactcattcaccatgtgacctggcttggcttcagccttgctgcgcttgcatgggtcttctggttaaccggtctgtaaggagcactgacggaatatggaaaatcttgctctgacgacgttattgctgccttttatcggcgcactggtcgttagctttagcccacaacgtcgggccgccgaatggggggttttgttcgccgcgctgaccacgctgtgcatgttgagtctgatctccgcgttttatcaggccgataaagttgccgtcacgttgacgttggtcaacgtgggggatgtggcgttgtttggcctggtcattgatcgcgtgagtacgctgattctgtttgtggtggtgtttctcggtttgctggtcacgatctactccacgggttatctgacggataaaaatcgcgaacacccgcataacggcacgaatcgttattacgcatttttactggtgtttatcggcgcgatggcgggactggtactctccagcacgctgctcggtcagttgttgttttttgaaattacaggcggctgctcctgggcgttgatcagttattaccagagcgataaagcgcagcgtagtgcactaaaagcgttacttatcactcatatcggcagcttggggttgtatcttgccgccgccacgctgtttttgcagaccggaacgtttgcgcttagcgcgatgagcgagttacacggcgacgcacgttatctggtttatggcggcatcctgtttgccgcgtgggggaaaagcgcccagctaccgatgcaagcgtggctaccggacgcaatggaagcgccaacaccgatcagcgcctatctccacgccgcaagcatggtgaaagtgggcgtttacatttttgcccgcgctattatcgacggcggcaatatcccgcatgtgattggcggcgttggcatggtcatggcactggtcaccattctttatggctttctgatgtatttgccacagcaggatatgaagcggttgctagcctggagcaccatcactcaacttggctggatgttcttcggcttgagcctctccatcttcggcagccggctggcgctggagggcagcatcgcctacatcgtcaaccacgcgttcgctaaaagcctgtttttccttgtagcaggtgcgctgagttacagctgcggcacgcgcttgttgccgcgtctgcgtggcgtattgcacaccctgccgttgccaggcgtgggtttctgcgtggcagcgctggcgattaccggcgtgccgccgttcaacggcttcttcagtaaattcccgctgtttgctgccggttttgcgttgagtgtggagtactggatcctgctgcccgccatgattcttctgatgattgaaagcgtcgccagtttcgcctggtttattcgctggtttggtcgcgttgtgcctggcaaaccgagcgaggccgtcgccgatgccgcaccgctgccaggaagtatgcgcctggtgttgattgtactgattgtgatgagcctgatttccagcgtaatcgccgcgacctggttgcagtaaggagatgatgaatgaccggttctatgatcgtaaataatctggcgggactgatgatgctgacaagcctgtttgtgattagcgtcaaaagctatcgcctgagttgcggattttacgcctgccagagtctggtgctggtgtctattttcgccactctcagctgcctgttcgccgcagagcaactgctgatctggtccgccagcgcctttatcaccaaagtgctgctggtaccgttaatcatgacttacgctgcacgaaatattccccagaacatcccggaaaaagcgttattcggtccggcaatgatggcactgctcgcggcgttaattgtcctgctttgcgcatttgtcgttcagcccgtgaagctaccgatggctaccgggctgaaaccggcgctggcggtagcgttaggtcattttctgcttggcctgctgtgcattgtcagccagcgcaatatcctgcggcaaatttttggttactgcctgatggaaaacggctcccatctggtgctggcgcttcttgcctggcgagcaccggaactggtggaaataggtatcgctaccgacgccatcttcgccgtcattgtgatggtgttactggcaagaaaaatatggcgtacccacggcacgctggacgtgaacaacttgaccgcgctgaagggataatgagatgagttattctgtgatgttcgctttactcctgctcacgccgctgctttttagcctgctctgttttgcctgccggaaacggagactttctgcgactcgcacggtgaccgtattacatagcttagggatcacactgctgctgattctggcactctgggtggtccaaactgccgctgatgcaggagaaatattcgctgcgggactgtggcttcatattgatggtctgggcggtttgttcctcgccattcttggtgtgattggctttctcaccggtatttacagcattggctacatgcgtcatgaagtggcacacggcgagcttagtcccgttacgctgtgcgattactacggtttcttccatctgtttttgttcaccatgctgctggttgttaccagcaataacctgattgtgatgtgggcggcgatcgaagccaccaccttaagcagcgcgtttctggtaggcatttacggtcagcgtagtagcctggaagctgcatggaagtacatcattatttgtactgttggtgtcgcttttggtctgttcggtaccgtgctggtatacgccaacgccgccagcgttatgccgcaggcagaaatggcgatattctggagcgaggttcttaagcaaagctccttgcttgacccaacattaatgctgttggcctttgtgtttttgctaattggctttggtaccaaaaccgggctatttcccatgcacgcctggctgccggatgctcacagtgaagcgccgagtccggtcagcgccctgctctccgccgtattgctgaactgcgcgctgttggtgctgattcgctattacatcattatttgccaagccatcggcagcgatttccccaaccggttgttgctcatcttcggcatgttgagcgttgccgtggcggcatttttcattctggtacagcgggacattaagcgtctgctggcgtactccagcgtggagaacatggggctggtcgcggtggagctaggcattggcgggccgctgggaatttttgccgcgctgctgcacatcttaaaccacagtctggcaaaaacgctgctgttctgcggttccggcaatgtactgctcaagtacggcacgcgcgatctcaacgtcgtctgtgggatgctcaaaatcatgccatttaccgccgtgctgtttggcggcggtgcgctggcgctggcagggatgccgcccttcaacatttttcttagcgaatttatgaccattaccgccggactggcacgtaatcacctgctgattatcgtcctgctgttattgctgttaacgctggtgctggcgggcctggtacggatggctgcgcgggtgttaatggcgaaaccgccgcaggccgttaaccggggtgatctcggctggttgaccaccagcccaatggtgattctgctggtcatgatgctggcgatgggaacgcatattccacaacctgtcatcaggatcctggcgggcgcttccactatagtcctcagtgggacgcacgatctgcctgcacaacgtagcacctggcatgattttttgcctagtggcaccgcatctgttagcgagaaacacagtgaacgttaatagtagcagtaatcgtggcgaagcgattctcgccgccctgaaaacgcagttccccggcgcggtgctggatgaagagcgacaaacgcctgaacaggtcaccattacggtgaaaatcaatctgctgcctgacgttgtacagtatctttattatcaacatgatggctggcttccggtcctgtttggcaacgacgagcggacacttaacggtcattacgcggtttattatgcccttagtatggaaggggccgaaaaatgctggattgtggtgaaggcgctggtcgatgccgacagtcgggagtttccgagtgtcacaccgcgcgtccctgccgcggtctggggcgagcgagaaattcgcgatatgtacgggctgattccggttggcctgccggatcagcgtcgcctggtgttgcccgatgactggccggaagatatgcatccgctgcgcaaagatgcgatggattatcgactgcgccctgaaccgacgactgattccgaaacgtatccgtttatcaatgagggcaacagcgatgcgcgggtgatccctgtcggcccgctgcatatcacctccgatgaaccgggtcacttccgcttgtttgtggatggcgagcaaattgtcgatgctgattaccgcctgttttatgtccatcgcggcatggagaaactggcagaaacgcggatgggctacaacgaagtgaccttcttaagcgaccgcgtgtgtgggatttgcggttttgcccacagtgtggcctataccaatagcgttgaaaatgcactggggattgaggtgccgcaacgagcacatactattcgcagcattctgctggaagtcgaacggctacacagtcatttgcttaaccttggcctctcctgccatttcgttggttttgataccggctttatgcaatttttccgcgtgcgggaaaagagcatgacgatggcggaattgctgatcgggagccgtaaaacctacggtctgaatctgattggtggtgttcgccgcgatattctcaaagagcaacgtctgcaaacgctgaaactggtgcgcgagatgcgcgccgacgtgagcgagctggtagagatgctgcttgctacgccgaatatggaacaacgcactcagggcattggcattctcgaccgacaaatcgcccgtgatttgcgctttgatcacccctacgccgactacggcaatattccaaaaacactgtttacctttaccggcggcgatgttttctcccgcgtgatggtccgtgtcaaagagacgtttgatagcctggcaatgctggaatttgccctcgacaacatgccggataccccactgctgaccgaaggctttagctataaacctcacgcattcgcgctgggctttgttgaagcgccacgcggtgaagacgtgcactggagcatgctcggtgataaccaaaaattgttccgctggcgctgccgtgccgccacctacgccaactggccggtgttgcgttacatgctgcgcggcaataccgtttctgacgcaccgctgattatcggtagccttgatccctgctactcctgtaccgaccgtgtgacgctggtagatgtgcgcaagcgccagagtaaaaccgtgccgtataaagagatcgaacgctacggcattgatcgtaaccgtagcccgctgaagtaaggacagaagatgctgaagttactgaaaactattatgcgcgccggaaccgcgacggtgaaatatcccttcgcgccactggaggtcagccctggctttcgcggaaaaccggacctgatgcccagccaatgtattgcctgcggtgcctgcgcctgtgcttgtccggcaaatgcgctggctatccagaccgacgaccagcaaaatagccgcacctggcagctctatctggggcgttgtatttactgcggacgttgtgaagaagtgtgcccgaccagagccatccagcttaccaataactttgaactgaccgtcaccaataaagccgatctctatacccgcgcgacgttccatctacaacgttgcagccgttgcgaacgcccgtttgccccgcaaaaaaccatcgcactggctgctgaattgttagcacagcaacaaaatgcgccacaaaaccgcgaaatgttgtgggcgcaagcgagcgtctgcccggaatgcaaacaacgcgcgacgctgatcaacgacgatacagatgtactgctggtggctaaggagcagctatgagtccagtgcttacacaacatgtcagccagcccatcacgctggacgagcaaacgcaaaagatgaagcggcatttgctacaggatatccgtcgcagcgcttacgtttatcgcgtcgattgcggcggctgcaacgcctgtgaaatcgaaatttttgctgccattacaccagtattcgacgcagaacgttttggcattaaggttgttagtagtccgcgtcacgccgatattttgttatttactggcgcagtcacccgggcgatgcgtatgcctgcacttcgggcgtatgagtctgcccccgatcataaaatttgtgtttcctacggcgcgtgcggtgtcggcggcggtattttccacgatctctacagcgtctggggcggtagcgacaccattgtccccattgatgtttggatccccggctgcccgccaacaccggccgccaccattcacggtttcgccgtggcgctcggtttgctgcaacagaagattcacgctgtggattatcgcgatcccaccggggtgactatgcaaccgttgtggccgcagatcccgccaagtcagcgtatcgccattgagcgagaagcgcggcggctggcgggctatcgtcaggggcgagaaatttgcgatcggctcctgcgccatttaagcgacgatcctacaggaaatcgggttaacacctggttgcgcgatgccgacgatccacgtctcaatagtatcgttcagcaactctttcgcgtactccgggggttacatgactgaagagtgcggggaaattgttttctggacgctgcgaaaaaagtttgtcgccagtagcgacgagatgccggaacacagctctcaggtaatgtattacagcctagctatcggccatcacgttggcgtgattgattgtctgaatgtcgccttccgctgcccactgacggaatacgaagattggcttgcactggtcgaagaggagcaagcccgacgtaagatgctgggggtgatgacttttggtgagattgttattgacgccagccacaccgccctgttgacccgggcattcgcgccactggcggatgacgcgacgtctgtgtggcaggcgcgtagcattcaattcattcatctgttggatgaaattgtgcaggaaccggccatctatctgatggccagaaaaattgcgtgagaaggatttctcattaataaggactgttgatggctatgagtgacgaggcgatgtttgccccgccacaaggaataacaattgaagcggtaaacggaatgctcgcggagcggttagcacagaaacacggcaaggcgtctttattacgcgccttcatcccgctgccgccgccgttcagcccggtacaacttattgaactgcatgttctcaaaagcaacttctattaccgctaccatgatgatggcagcgatgtgacggcaacaacagagtatcagggcgagatggtcgattatagccgtcacgccgtccttctcggcagtagtggaatggcggagctacgctttattcgcacccacggcagtcgttttacttcccaggattgcacactgtttaactggctggcgcggataatcaccccggttctgcaaagttggctcaatgatgaagaacagcaggtggcgctgcgtttgctggagaaagatcgcgatcatcatcgggtactggttgatattactaatgcagtgctgagtcatcttgatctcgacgatctgatcgctgacgtcgctcgtgagatccatcattttttcggtctggctagtgtcagtatggtactgggcgatcatcgaaagaacgagaagttcagcctgtggtgcagcgatctttctgccagtcattgtgcgtgtctgccacgctgtatgcctggcgaaagtgtattgctgacacaaacgctacaaacccgacaaccgaccttgacgcaccgtgcagatgatctgtttctctggcaacgcgacccgttattactcttacttgcatctaacggctgcgaatctgcgctccttataccgcttacctttggcaaccatacaccgggtgcattgttgctggcgcatacctcttccactctctttagtgaggaaaactgccagctactacaacacatagccgatcgcatcgctattgccgttggcaatgccgatgcctggcgtagcatgaccgatttgcaggaaagtttgcagcaagaaaaccaccagcttagcgagcagctccttagcaatctgggcatcggtgacattatctatcaaagccaggcaatggaagacctgctccagcaggtagatattgtggcgaagagcgacagtacggtgttgatttgtggtgaaaccggaactggcaaagaggtgatcgccagagcgatccatcaacttagcccgcgacgcgacaagccgctggtcaaaatcaactgcgctgccatccccgccagtcttctggaaagtgagttattcggtcatgacaaaggggcgtttactggtgcgattaatacccatcgtggtcgttttgaaattgccgatggcggcacgttgtttctcgatgaaattggcgatctgccgttagaacttcagcctaaactgctgcgcgtattgcaggagcgggagattgagcgtctcggcgggagtagaacgatcccggtgaatgtcagagtcattgccgccaccaaccgtgatttgtggcaaatggttgaagatcgccagtttcgcagcgatctcttttatcgcctgaatgtcttcccactggaattgccgccgctacgcgaccgtccggaagatatccctcttttagcaaaacatttcacgcaaaaaatggcgcgccatatgaatcgcgcaattgacgccatcccgaccgaggcactacgccagttgatgagctgggattggccgggcaacgtgcgcgagctggaaaacgtgattgagcgggcggtactgttgactcgtggtaacagtctgaatttacatctaaatgtccgacaaagccgtttactgccgacgctaaatgaagatagtgcgcttcgcagtagtatggcgcagttactgcacccgacgacgccagagaatgacgaagaagaacgtcagcgcattgttcaggtattgcgagaaaccaatggcattgttgccgggccccgtggcgcagcgacgcgattagggatgaagcgcaccacgctgctgagtcgaatgcagcggctggggatcagcgttcgcgaggtgttgtaatctgcttttgcaggagtatgcatgagaaacaaactctctttcgacttgcagttgagcgccagaaaagcggcaatcgctgaacggattgccgcccataaaattgcccgcagtaaagtgagcgtctttttaatggcgatgtccgctggcgtgtttatggcgatcggatttactttttacctttccgttatcgccgatgccccgtctagtcaggcattaacccatctggtgggcggcctttgctttacactcggctttattttgctggcggtttgcggcaccagcctgttcaccagcagcgtaatgacggtgatggcaaaaagtcggggcgtcattagttggcgaacttggctgattaacgcacttctggtggcctgcggtaatctggcaggtattgcctgtttcagtttgttaatctggttttccgggctggtgatgagtgaaaacgcgatgtggggagtcgcggttttacactgcgccgagggcaaaatgcatcatacatttactgaatctgtcagcctcggcattatgtgcaatctgatggtttgcctggcgctgtggatgagttattgcgggcgtagcttatgcgacaaaatcgtcgccatgattttgcccatcaccctgtttgtcgccagtggctttgagcactgtatcgccaatttgtttgtgattccgttcgccattgccattcgccatttcgcccctccccccttctggcagctggcgcacagtagcgcagacaattttccggcactgacggtcagccattttattaccgccaatctgctcccggtgatgctgggtaatattatcggcggtgcggtgctggtgagtatgtgttatcgggctatttatttacgtcaggaaccctgaaaaatcagcccggcgaaacagttcgtcgggctgaagattattcttgcgcgatttgcccatcgggccaggcatgaatcacggctttgatcagcgtcgccaacggaatggcgaagaatacgccccagaatccccacaaaccaccgaagatcaccacgcttaaaataatcaccagcggatgcaggttaaccgcttcggagaacaacaccggcactaacaggttgccgtccagcgcctgaataatcagatacaccgcgaagcagctccagaattcagtacctgcgccaaactggaatagcgccacgccaaccaccggaatggtcaccacaaatgcgccaatgtacggaataagaacgctgaagccgaccagcactgccagcagcaggctatagttcagcccgaagagcaagaaccccagccaggtggcgatccccaccacgatcatctccagcactttgccgcggatatagttggtgatttgttgattcatctccttccacacctgtcctgccagcccacggttacgcggcagcacccggcgaacggcgttcagcatctgctctttgtctttcagcaggaagaagaccatcaatggcaccagcaccagatagacggctatggtcagcaaaccgaccaggctggcgagggaaattttcaccacgctatcgcccatggtcagcatccgactgcgcatattttcggccattgcatcaataatgcccgcgtccattaacgccggatagcggcgcggcaacgtggcggcaaagtcagaaagcttattgagcatccccggcatatcgcggattaagtagatgccctgttgccaggcgataggcagtaccacgaacgccatcagtagcaatataccgacgaaaaccaccaatacaatgctcgtcgcccagcggcgggagcagccaatagattgcagacgcacggttggccattccagcaaataggccagcacaatagccaccagcaacggagcaagcaggccactaaagaaaaagataatgccaaatccggcaactaaaataaccagcaaggcaatcgcttccgggtcgctaaaacggcggcgataccattgcatcaacatttcgagcataaagaccttccctgaacctcaagagcgggattgcgatccgcaattgtatcgaaatgtcacaaaaaagacttcgctttttatgacggattcaggaaactgaaaagtcatttgagtgggctaatcttcgccgttacactcaaaggcggcgcggtgggaacgatatttcacagtatcggtcaaatgactatctccagaaatacaggatagaggttatgttcaggcagttgaaaaaaaacctggttgcaaccctcattgctgctatgaccattggtcaggtagccccggcgtttgccgacagcgcagacaccttgccggatatgggaacctccgcaggaagcacgctttccattggtcaggaaatgcagatgggcgactattatgtccgccagctacgcggcagcgcgccgttaattaatgacccgctgttaacgcaatatattaatagcctggggatgcgtctggttagccatgccaatagcgttaagacaccgtttcatttttttctgatcaacaacgacgaaattaacgcctttgctttctttggcggcaacgtggtgctgcactctgccctgttccgttattccgataacgaaagtcaactggctagtgttatggcgcacgaaatctcccacgtcacccaacgtcacctggcgcgagcgatggaagatcagcagcgcagcgcgccgctgacctgggtcggcgcgttaggttctattttactggcgatggccagtccgcaggcggggatggcggcgctgaccggtacactggcgggaacgcgtcaggggatgatcagtttcacccagcaaaatgaacaggaagcggaccgcattggtattcaggtgctgcaacgcagcggattcgatccgcaggcgatgccaaccttcctcgaaaaattactcgatcaggcgcgttactccagccgcccgccggaaattttattgactcacccgttgccggaaagtcgtctggcagatgcccgcaaccgtgctaatcagatgcgcccgatggtggtgcagagcagcgaagatttctatctggcgaaagcgcgcacactggggatgtataattccggacgtaaccagctcaccagtgatttgctggatgaatgggcgaaaggaaacgttcgtcagcaacgagcagcacaatatggtcgtgctttacaggcgatggaagccaataaatacgacgaggcgcgtaaaacgctgcaaccgttactggcggcagaacctggcaacgcatggtatctcgatctggctactgatatcgatcttgggcaaaacaaagccaatgaggcgatcaatcgtctgaaaaatgcccgcgatttacgcaccaatccggtgttgcagctcaacctggcgaacgcttatttgcaaggcggtcaaccacaagaagcggccaatattctgaatcgctacacctttaataataaagatgacagcaacggctgggatttgctggcacaggcggaagccgcgctaaataaccgcgatcaggagctggctgcgcgagcagaaggttatgcgctcgccggacgactcgatcaggccattagcctgttgagtagcgccagtagccaggtgaaattaggcagcctgcaacaagcgcgttacgatgcgcgcatcgaccagttgcgccagctgcaggaacgctttaagccttataccaagatgtaattcgcattaaaggaagaacaatgaccaaacaggtaaaaatctaccataacccacgctgtagtaagagccgggaaacgctgaacctgctgaaagaaaacggcgtggagccagaagtggtgctctaccttgagacacccgccgatgcggcaacgctgcgcgatttgctgaaaatactggggatgaatagcgcccgtgaattgatgcgccagaaagaggatctttataaagaactgaacctggctgacagtagccttagcgaagaggcgctgattcaggcaatggtggataatccgaagctgatggagcgcccgattgtggtcgcgaatggcaaagcgcggattggtcgtccaccggagcaggtactggaaatcgtgggttaagatgtgctccatcgctagttgaagcacattgccggatgcgacgcttgccacgtcttatccggcctacgaatactatggattaacttcgcgtagttcggataaggcgttcgcgccgcatccgacaataaacaccttatttacaacttcagaatttctttcacaaacggaatggtcagcttacgttgcgcggtaatgctcgcacgatccaactgatccaacgtcataaatagcgtgcgcatttctctgtcgagccgcttcagcaagaaacgccccacatcttccggcagttcaaaaccacgcaaacgcgcgcgtaactgtagcgcctgcaacttatcttcatcagaaagtggctgcaatttgtagatctgcccccagtcgagtcggctcgcgagatccggtaatcccagattcaactgccgcggtggacgatcgccggtgatcaacaaccgtgttttgccgctttccagaattcgattgtagagatcgaaaatcgccatctcccacaactcatcgcctgcaatacactcaatgttgtcgatacagaccaggctcaaatgctccataccgtcgagcacttccggaacaaaccaggtgcgtttatccagcgggacatagcccaccgcatcgccacgctggctcaattccgcgcaagccgcgtgcagcagatggctgcgccccgcgccttcgcgtgcccagagatagatgtaaccgctatgttcctgacgcagcacgttttgcagcgcggccagtaaagaggagttatcccccggccagaaacttgcaaaggtttcgtcgtcaggaagataaagtggcaaagagagctgtgccggtgtgttcagagatacctcaaccaggatttcacaaaatcggctgaagtttaccacagaatcccatgatgtttgaaccgggcagcaacactgcccggtcggtacattatttgtctgttatatccgcgtcttctgcgtccagcaccacttcttcagggcgcagcacactgatcagtttgaagatcaaacttaagccgataccgacgatggtcgccagcgccataccttttaactccgccgcgccgatgtttaccttcgcgccactgacgccgatgatcaaaatcacggaagtcaggatcaggttctgtgctttgttgtaatccactttgctttcgatcaaaacacgaataccggaagcaccgatgacaccataaagcagcaggctaacgccgcccatcaccggcaatgggatcatctggatagcggcagccagtttaccgacgcaggaaagcaggatagcgaaaatcgccgccccgccgataacccaggtactgtaaacacgggtgatcgccatcacgccaatgttttctccgtaagtagtatttggcgtagagccaaagaagccggaaatcacggtgctcaagccattagcaaacatgctacggtgcagacctggatcgcgcagcagatcttttttgacgatattagccgttactaccaggtgccctacgtgttcggcaataaccactaacgccgctggcagaatagtcagaatggcaaaccactcgaagcgcggcgtatagagggttggcagcgcaaaccagtgagcattaataatcggcgtggtatcgacaattcccattgcgaaagagagcgcgtaccccaccagcacgccaattaaaatcgggataattgccaggaaaccacgaaacagcacggaacctaaaaccgtgaccgccagggtggtaatagagatgatgatggttttggagtctggcgtttgcccttcagccgggagtaaacccgccataccggcagctacgcccgccagctccagaccgatgacggcaacgattgcgcccattgccgcaggtggaaacagcacgtccagccagccggtccccgctttcttcacgataaaagaaaccaggcagaacagcacgccgcacataataaagccgcccagcgcgacttcataccctaacggcaacagtaacaataccggactaataaaggcaaagctggaaccaagataagccggaattttccctttacagatgaagagatacagcagcgttccaataccgttaaataacagtacagtcgccgggttaatatgaaataagacgggcaccaggacggttgcaccaaacatggcgaacaaatgttgcaaactaagcgggattgtctgtaaaagtggcggtctttcactcaccccgatagcacggcgcgtcatagtattatcctctgtattatgtgttataggcgctttactcaaaaaaaagccgactcttaaagtcggctttaattatttttattctttatttcgtaccaaagattttgtcaccggcatcgccgaggcccggaataatgtatccgtgctcgttcagtccctgatcaatgcttgcggtatacagttcgacgtccgggtgcgctttttccagcgcagcgataccttctggcgcagctaccagcaccagaactttgatgctgctgcagcccgcttttttcagcaggtcgatggtcgcgataacggaaccaccggttgccagcattgggtcaacgatcagcgccatacgctcatcgatgttagaaaccagtttctggaagtacggtaccggctccagcgtttcttcattacggtacataccgacaacgctgatgcgcgcgctcggaacgttttccagcacaccgtccatcataccaagacccgcacgcagaattggcacaacggtaattttcttacctttgatctggtcgatttctaccgggccgttccagccttcgatagttactttttccgtttcgaggtcggcggtcgcttcgtaagtcagcaggctacccacttcggaagcgagttcgcgaaagcgcttggtgctgatatcttgctcacgcatcagtcccagcttgtgtttgacgagtgggtgtttgacttccacgatcttcatactctttctcctttgaggggcagccacaaaaaaaatcgacggattatacctcctttcttcaaggcggcaatattcttttcgttgactttagtcaaaatgataacggtttgagataaagttattttatattcagatggttatgaaagaagattattccatccgaaaactaacctttaccctggcacaagtcttctttcgccgcgcgcctggggaaaagacgtgcaaaaaggttgtgtaaagcagtctcgcaaacgtttgctttccctgttagaattgcgccgaattttatttttctaccgcaagtaacgcgtggggacccaagcagtgaccgataaaacctctcttagctacaaagatgccggtgttgatattgacgcgggtaatgctctggttggaagaatcaaaggcgtagtgaagaaaacgcgtcgtccggaagtgatgggcggtctgggcggcttcggtgcgctgtgtgcattgccgcaaaaatatcgtgaacccgtgctggtttctggcactgacggcgtaggtaccaagctgcgtctggcaatggacttaaaacgtcacgacaccattggtattgatctggtcgccatgtgcgttaatgacctggtggtgcaaggtgcagagccgctgtttttcctcgactattacgcaaccggaaaactggatgttgataccgctagtgcggtgatcagcggcattgcggaaggttgtctgcaaagtggctgtagtctggtgggtggcgaaacggcagaaatgccggggatgtatcacggtgaggattacgatgtcgcgggtttctgcgttggcgtggtagaaaaaagtgaaatcatcgacggctctaaagtcagcgacggcgatgtgctgattgcactcggttccagcggtccacacagcaacggctatagcctggtgcgcaaaattcttgaagtcagcggttgtgatccgcaaaccaccgaacttgatggtaagccattagccgatcatctgctggcaccgacccgcatttacgtgaagagtgtgctggagttgattgaaaaggtcgatgtgcatgccattgcgcacctgaccggcggcggcttctgggaaaacattccgcgcgtattgccagataatactcaggcagtgattgatgaatcttcctggcagtggccggaagtgttcaactggctgcaaacggcaggtaacgttgagcaccatgaaatgtatcgcaccttcaactgcggcgtcgggatgattattgccctgcctgctccggaagtggacaaagccctcgccctgctcaatgccaacggtgaaaacgcgtggaaaatcggtatcatcaaagcctctgattccgaacaacgcgtggttatcgaataatgaatattgtggtgcttatttccggcaacggaagtaatttacaggcaattattgacgcctgtaaaaccaacaaaattaaaggcaccgtacgggcagttttcagcaataaggccgacgcgttcggccttgaacgcgcccgccaggcgggtattgcaacgcatacgctcatcgccagcgcgtttgacagtcgtgaagcctatgaccgggagttgattcatgaaatcgacatgtacgcacccgatgtggtcgtgctggctggttttatgcgcattctcagcccggcgtttgtctcccactatgccgggcgtttgctgaacattcacccttctctgctgccgaaatatcccggattacacacccatcgtcaggcgctggaaaatggcgatgaagagcacggtacaagcgtgcatttcgtcaccgatgaactggacggtggcccggttattttacaggcgaaagtcccggtatttgctggtgatagcgaagatgacatcaccgcccgcgtgcaaacccaggaacacgccatttatccactggtgattagctggtttgccgatggtcgtctgaaaatgcacgaaaacgccgcgtggctggatggtcaacgtctgccgccgcagggctacgctgccgacgagtaatacccccgtaattaaagcgccagctctgccgctggcgtttttcaattcacctgtaaatcgcaagctccagcagtttttttcccccttttctggcatagttggacatctgccaatattgctcgccataatatccaggcagtgtcccgtgaataaaacggagtaaaagtggtaatgggtcaggaaaagctatacatcgaaaaagagctcagttggttaagcttcaatgaacgcgtgcttcaggaagcggcggacaaatctaacccgctgattgaaaggatgcgtttcctggggatctattccaataaccttgatgagttctataaagtccgcttcgctgaactgaagcgacgcatcattattagcgaagaacaaggctccaactctcattcccgccatttactgggcaaaattcagtcccgggtgctgaaagccgatcaggaattcgacggcctctacaacgagctattgctggagatggcgcgcaaccagatcttcctgattaatgaacgccagctctccgtcaatcaacaaaactggctgcgtcattattttaagcagtatctgcgtcagcacattacgccgattttaatcaatcctgacactgacttagtgcagttcctgaaagatgattacacctatctggcggtggaaattatccgtggcgataccatccgttacgcgctgctggagatcccaagtgataaagtgccgcgctttgtgaatttaccgccagaagcgccgcgtcgacgcaagccgatgattcttctggataacattctgcgttactgccttgatgatattttcaaaggcttctttgattatgacgcgctgaatgcctatagtatgaagatgacccgcgatgccgaatacgatttagtgcatgagatggaagccagcctgatggagttgatgtcttccagtctcaagcagcgtttaactgctgagccggtgcgttttgtttatcagcgcgatatgcccaatgcgctggttgaagtgttacgcgaaaaactgactatttcccgctacgactccatcgtccccggcggtcgttatcataattttaaagactttattaatttccccaatgtcggcaaagccaatctggtgaacaaaccactgccgcgtttacgccatatttggtttgataaagcccagttccgcaatggttttgatgccattcgcgaacgcgatgtgttgctctattatccttatcacacctttgagcatgtgctggaactgctgcgtcaggctagcttcgacccgagcgtactggcgattaaaattaacatttaccgcgtggcgaaagatagtcgcatcatcgacagcatgatccacgccgcacataacggtaagaaagtcaccgtggtggttgagttacaggcgcgtttcgacgaagaagccaacattcactgggcgaagcgcctgaccgaagcaggcgtgcacgttatcttctctgcgccggggctgaaaattcacgccaaactgttcctgattagtcgtaaagaaaacggtgaagtggtgcgttatgcacacatcgggaccgggaactttaacgaaaaaaccgcgcgtctttatactgactatagcttgctgaccgccgatgcgcgcatcaccaacgaagtacggcgggtatttaactttattgaaaacccataccgtccggtgacatttgattatttaatggtaagcccgcaaaactcccgccgcctattgtatgaaatggtggaccgcgagatcgccaacgcgcagcaagggctgcccagtggtatcaccctgaagctaaataaccttgtcgataaaggcctggttgatcgtctgtatgcggcctccagctccggcgtaccggttaatctgctggttcgcggaatgtgtagcctgatccccaatctggaaggcattagcgacaacattcgtgccatcagtattgttgaccgttaccttgaacatgaccgggtttatatttttgaaaatggcggcgataaaaaggtctacctttcttccgccgactggatgacgcgcaatattgattatcgtattgaagtggcgacgccgctgctcgatccgcgcctgaagcagcgggtactggacatcatcgacatattgttcagcgatacggtcaaagcacgttatatcgataaagaactcagtaatcgctacgttccccgcggcaatcgccgcaaagtacgggcgcagttggcgatttatgactacatcaaaagtctcgaacaacctgaataaccctatgccaatacacgataaatcccctcgtccgcaggagtttgctgcggtcgatcttggtagtaacagttttcacatggtcatagcccgtgtggtagatggtgccatgcagattattggccgcctgaaacagcgggtgcatctggcggacggcctggggccagataatatgttgagtgaagaggcaatgacgcgcggtttaaactgtctgagcctgtttgccgaacggctacaagggttttctcctgccagcgtctgtatagttggtacccatacgctgcgtcaggcgctgaacgccactgactttctgaaacgcgcggaaaaggtcattccctacccgattgaaattatttccggtaatgaagaagcccgtctgatttttatgggcgtggaacatacccaaccggaaaaaggtcgcaaactggttattgatattggcggcggatctacggaactggtgattggtgaaaatttcgaacctattctcgttgaaagccgccggatgggttgtgtcagctttgcccagctttattttcctggcggggtcatcaataaagagaattttcagcgcgctcgcatggcggcagcacaaaaactggaaactttaacctggcaattccgtattcagggctggaacgttgcaatgggcgcttccggtaccataaaagccgcccatgaagtgttaatggaaatgggcgagaaagacgggataattaccccggaacgtctggaaaaactggtaaaagaagttttacgtcaccgtaatttcgcaagcctgagtttaccgggtctttccgaagagcggaaaacagtcttcgttccgggactggcgattttatgcggtgtgtttgatgctttagccatccgtgaactgcgcctttctgacggggcgttacgcgaaggcgtactgtatgaaatggaaggacgtttccgtcatcaggatgtgcgtagtcgcaccgccagcagcctcgccaaccagtatcacatcgacagcgaacaggcccgacgggtgctggataccactatgcaaatgtacgaacagtggcgggaacagcaaccgaagctggcgcatccgcaactggaggcgctactgcgatgggccgccatgctgcatgaggtcgggttgaatatcaaccacagcggtttgcatcgccactccgcttatattctgcaaaacagtgacttgccgggttttaatcaggaacagcagctgatgatggcgacactggtgcgctatcaccgtaaagcgattaagctcgacgatctaccgcgctttaccttgtttaagaagaaacagttcctgccactgatacagctattgcgccttggcgtattactcaacaatcaacgtcaggcaaccaccacaccgccaacattgacgctgattactgatgacagtcactggacactgcgtttcccgcatgactggtttagtcagaatgcgctggtactgcttgatctggaaaaggagcaagaatactgggaaggcgtggctggctggcggttgaaaattgaagaagaaagtacaccagaaatcgccgcttaatactttgcgggccgacgagaaatgtcggcccgcattattcaggcactttcgcgaatgggttcgatttcattcagcgtatcaattaacggctgcggcttaccaataagataaccctgcatataatcgatccccaaagagagcaccgcctcgcggatctcttcgttttcaacgtactctgccactaccagcattttcttcattcgcgccaggtggcaaatgcttgccactatctgataatccagactattactcacaatattgcggataaaactgccgtcaattttaagcagatcggcattcacatttttaagccgcgcatagctggcgtagccggtgccgaaatcatcaatcgcaatctggcagcctaattcctgaagatgctgcaaggtgatttgcgcctgcttaacattggtcagagcattactttcggtgacttcaaaaataagttgccacgcttcaatctgatatttagccagcaactgactgacttcaacaggaaaacgagcctgacatacgctggttggagacagattaatagcaaaacggtgagcgggcatcttcgctctgttttcagccataaattgcagcgtatgctcaatgacccacatgtcgatactgctgcttaaaccaaattcgtgcgcgaccggcaagaagctatcggggctgatcagttcatcattctcacctttcatgcgcagaagaatttcatggtaaacatcaccacgcataccggtaatcggctgggccatcaggaaaaaatggttgtgttccagcgcctgctgtagtcgattcatcatcgcgactttatctttcaattcgcgttgcaaatacattgccccgcgacgctgcatattttccggggcgttggtcacgatggaaagttcggcgaccgtatttagctctcccagcagcaggtagatatgattcactgggctgcgcacatagcagtaactgacgccaatctgcggttgcatcggcatgccatcccaaaagaaacgaaattgcttgagatggctatccagtgcggtaatgcgctcctggtggctttctgtattcagtcgcagcgcgagatcgttaccgctaagctgataaacatcttcacccggttccagcaagggactcagccagtgagaaagtttttgcttgtattgaatccgcagcatgatgccatagttcttaaccagcatttccatgccagggatgcgtaaataacaaagcgcagaccagggggcatcacgcaacgcgcgattcagggcgcgaacatttggcagatgaaccaccgggtccacatacgcaagccgctgaatgcgtctgactaccgctctctgacgggttgccagtacagccatataattgacaataaaagagaataccagataactggaggaggttatggtcagctgcgtggtatagccaggataaatgggaatgtaattttgatagctgtggatgctgatcatcaacacgaccgcccagagcaggctaatcagcttataaccatagcgcatcgctccccacatcatcaggggcagcaataaactcaaggtataattggtgctaaaaattgtgcttttttcatttaacggcatgcataacagcaacaataaagcacctaatgccagtagccagagcgcgaactcttttttggtgactttggcatcaacctgctgttttaattggctataatagctacgtaaataaaatggatttcgcactacccgaatgatgaagtagcacagcgggacaccgatcagattacccaccagtaaggcctgataattgattaaagtcccgaggttaaaaggcatgacaccgaccagattttctctgctcgccagtaatcctacaaatgcagcaaactggaaaagtatcagaaacagcgttgcaggaaacacaatctgccagaatatacgctgggaaattaaacgggtatcaccatgactaacgttgttacgccggggagtaaagaccctgtaaccgccccaacagagaatgataatgataataaaattagccgttaaacttagcgtttcgtaaaaacccagctctgcatatttgcggacaaaaatccctaaggcgatccctggcaatgccgcccagctgaaaaacatcatcatgctgatcatcagtgccagaggcagataaaagagaaaaacctcaccggaagaaatatgcgcgaaagtattaatgtgggcgaaaatgggcaagattaaagaaggcaggaacagcggaagcccccaccatttatcacgtatttttatataagttgcattcagtttcatagatgctcagcagaatcccccacatcctgaaggaggtgtattcagacaggcatcccacctgacttcgaatgatgattattcatcactatagagagcattgattctaagtgtcatatgaaagtaccaattgatatatatcaaacaaaataaccctgattaatgaattattacgtttatcatgttaattcatcattattacatcatcattgtaaataattaaattaacttccataacattaaaatatgtatccactgacgcttttttacataacgaagaattgaccattttgtcctgttgtgccttaatgtaagtaccgtccacagcgtgggacatacttcaaggaaccttttgtgagtcaggcaaccagtatgcgaaaacgacaccgatttaacagtcgcatgacccgtatcgtactgctcatcagctttatcttcttctttggccgttttatctacagctccgtcggtgcctggcagcaccatcagagcaaaaaagaagctcagcaatccacactctccgtcgaaagtccggtacaacgttaacggttaccttctccactttcacagaacataacggcacttcgctgtcggatgcttttgctgtttgggattatcaaagcggcagatattctttcatcttaaattttacgtctttatcctgactgatgtttatcctgtttggctgcgaaataaatataaaattaatatatatgttgtaatgatatatttttataaattattccctgcgtgaattttaataaatttaatctatccctttatacgcaatacatttactttcctcttttgatgatcttaaatgtcttatttttcgtaatgtgtataacaaggaatagtgatgaaatttaaaaaatgtcttctgcctgtggcaatgttagcgagtttcactctggcaggatgccagagtaatgctgacgatcatgctgccgatgtttatcaaaccgatcaactgaataccaaacaagaaactaaaaccgttaatattatttccattcttcccgcaaaagttgccgtagacaactcccaaaataaacggaacgcacaagccttcggcgcgcttattggcgcagtcgctggcggtgttatcggccacaacgtcgggtctggcagcaattccggaacgacggcaggtgcagttggcggcggagctgtaggcgcggcagcgggttctatggtgaatgataaaaccttagtggaaggtgtttctttaacctataaggaaggcaccaaagtgtatacctctacccaggtgggtaaagagtgccagtttacgacaggtttagccgttgttattaccacgacgtataacgaaacgcgtattcagccaaataccaaatgtcctgaaaagagctaataatcaggaggagtcatgaagaaagtttttctttgcgccatcttagcctccttaagctatccggctatcgccagtagtttgcaggatcaactctctgctgtcgcagaagcggaacagcaaggtaaaaatgaagagcaaaggcagcatgacgaatgggtcgcggagcgcaacagggaaatccagcaagagaagcaacgtcgcgcaaatgcccaggccgccgctaacaaaagagcggcaacggcagcggcaaataagaaagctcgtcaggataaactggacgccgaagcctctgcggacaaaaaacgcgatcaaagttatgaagatgagctacgcagcttagagattcagaaacaaaaactggcgctggcgaaagaagaagcccgcgttaagcgagaaaacgaatttatcgatcaggaactgaagcacaaagctgcgcaaaccgatgtggtgcaatctgaagctgacgccaacagaaatatgactgaaggcggtcgcgatctgatgaaaagcgtgggcaaagcagaagagaacaaaagcgacagctggtttaattaatcgatgttagtaacttcaatcctataattcttgaagataaaaaaccctctgtagtaacagagggttttgttcattcatagtgcagggtcaaatcattcccactcaatggtagctggcggcttgccgctgatgtcatacaccacgcgggaaataccgttcacttcattgataatgcggttggaaacgcgaccgaggaaatcgtacggcagatgcgcccagtgtgcggtcataaagtcgatggtttcgacagcacgcagagagacaacccagtcatacttacgaccatcgcccattacgccaacggaacgtaccggcaggaacacagtgaacgcctggctgactttgtcgtacaggtccgctttacgcagttcttcaatgaagatggcgtcagcacggcgcagcaggtcacagtactctttcttcacttcacccagaacacgaacgccaaggcctggtcccgggaacgggtgacggtacagcatgtcgtacggcaggcccagctccagaccaatcttacgcacttcgtctttgaacagctctttcagcggttcaaccaggcccatcttcatctctttcggcaggccgcccacgttgtggtgagatttgatgacgtgtgctttaccggttgcagacgccgcagattcgataacgtcagggtagatggtgccctgcgccagccacttcacgtcttccagtttcagcgcttcttcatcgaatacttcaacgaaaacgcgaccgatgattttacgttttgcttccggatcgttttcgccagccagcgcactcaggaagcgatcttctgccggtacgtgaacaatgttaagaccaaagtgatcgccaaacatatccagaacctgctctgcttcgttgaggcgcagcaggccgttgtcgacgaatacgcaagtcaggtttttaccgatagcgcggtgcagcagcattgcggttacggaggaatccacaccaccagagaggccgaggatgactttatcgtcgcctacctgctcgcggatgcgagctacagcatcgtcgataattttcgctggcgtccacagggcttcacactggcagatatcacgcacaaaacgctccagcatgcgcataccctggcgggtatgagtcacttccgggtggaactgtacgccatagaagcgtttttcttcgttagccataatggcaaacgggcagctttcggtgctggctacggtgatgaagtcggacggaatagcggtaactttatcgccgtggctcatccagacatcgagcagcggtttaccgtctgcggtcagcgcatcttcgataccgcgaaccagtgcgctgtcgtttacgacttcaacctgcgcgtagccaaattcacgttcgttagaggcttcaacgtgaccgcccaactgcattgccatggtctgcatgccatagcaaacgccgaataccggtacgcctgcttcaaagacatactgcggcgcacgcggactgttttcttcagtagtactttccgggccgccggaaagaataatgccgcttggattgaagtcacgaatttgtgcttctgtcacatcccacgcccacagttcgcagtaaacacccagctcacgcacgcggcgcgcaaccagttgagtgtactgagaaccgaagtccagaatgaggatgcgatgcttatgaatgttttccgtcattgacgcttattccgaggcaagtgaaacagataatataaatcgcccgacatgaagtcgggcgaagagaatcaggagcccagacggtagttcggggactctttagtaatggtcacgtcgtgaacgtggctttcctgaatgcccgcaccgctgatacgtacaaactccgctttagtacgcagttcgtcgatagtaccacagccggtcagacccatacaggagcgcaggccgcccatctgctggtgaatgatctctttcaggcgacctttataggctacgcgaccttcgataccttccggcaccagtttgtcggcagcgttatcgctctggaaataacggtcagaggaacctttggacatcgcgcccagggaacccataccacggtaagatttgtaagaacggccctggtagagttcgatttcacccggagattcttcagtacccgccagcatggaacctaccatcaccgcgcttgcgccagcggcgatagctttggcgatgtcgccggagaagcgaataccgccatcagcgataaccggaataccggtgccttccagggcttctactgcgtcagcaacagcggtaatctgcggaacaccgacgccagtcacgatacgagttgtacagatagagccagggccaatgccgactttaaccgcactgcaaccagcttctgccagagcgcgtgcacctgcagctgttgccacgttgccgccgataatttgcagatccggatatttagcacgggtttcacggatacgttgcagtacaccttcactgtgaccgtgggaggagtcgatcagcagaacgtcaacgcctgcggcaaccagcgcgtcaacacgctcttcgttacccgcacctgcgccaaccgctgcaccaacacgcagacggccttgctcgtctttacaggcgttcggtttacgttccgctttctggaagtctttcacggtgatcatgccgatcaggtggaattcgtcatcaaccaccagcgctttttcaacgcgtttttcgtgcatttttgccagcaccacttcacgggcttcaccttcacgcacggtgaccagacgctctttcggcgtcatgtaaacgctaaccggctggttcaggtcggtaacaaaacgcacgtcacgaccggtgataatacccaccagttcgttttcttcggtaacgaccggatagcccgcaaaaccgttacgctcggtcagttctttcacttcgcgcagcgtcgtggttggcagaacagtctgcggatcagtcaccacaccagattcgtgttttttcacacggcgaacttcttctgcctggcgttcaatggacatgtttttgtggataaagccgataccgccttcctgagccagagcaatagccaggcgcgcttccgttacggtatccattgctgcggaaagcatagggatattcagacgaatagttttcgtcagctgggtgctgaggtcagcagtattcggcagaacggtagagtgagcaggaacgaggagaacgtcgtcaaacgtcagagcttctttagcgatacgtagcatgggcaatatctcgaccagagtggttaataaatattgccgcggcattatacagagcgtaaccgattgcatctacccctttttgcaaaaaatgcttgctatccccgaagggcgggttactatcgactgaataacctgctgatttagaatttgatctcgctcacatgttaccttctcaatcccctgcaatttttaccgttagtcgcctgaatcaaacggttcgtctgctgcttgagcatgagatgggacaggtttggatcagcggcgaaatttctaatttcacgcaaccagcttccggtcactggtactttacactcaaagacgacaccgcccaggtacgctgcgcgatgttccgcaacagcaaccgccgggtgaccttccgcccacagcatgggcaacaagttttagttcgcgccaatattacgctctacgagccgcgcggcgactaccagataatcgttgagagtatgcagccggccggtgaagggctgctgcaacagaagtacgaacagctcaaagcgaagttgcaggctgaaggtttgttcgatcagcaatacaaaaaaccacttccctcccctgcgcattgcgttggtgtgatcaccagtaaaaccggtgctgcgctacatgatattttgcatgtgttaaaacgtcgcgatccttctctgccggtgatcatctaccctgccgccgttcagggcgatgacgcgccggggcaaattgttcgcgccattgaactggcgaatcagcgcaatgagtgcgacgtattgatcgtcgggcgcggcggcggtagcctggaagatttatggagttttaacgacgaacgcgtagcgcgggcgatttttaccagccgcattccggttgtcagcgccgtcgggcatgagacggatgtgaccattgccgattttgttgccgatctgcgtgcgccaacgccgtctgccgccgctgaagtagtgagccgtaatcagcaagagttactgcgccaggtgcaaagcacccgtcaacggctggagatggcgatggattattatctcgccaaccgcacacgtcgctttacgcaaattcatcaccgattacagcaacagcatccgcagctccggctggcacgccagcaaaccatgcttgagcgcctgcaaaagcgaatgagctttgcgctggaaaatcaacttaagcgtaccgggcaacagcagcagcggttaacacagcggctgaatcagcaaaatccacagccgaagattcatcgcgcgcaaacgcgcattcagcaactggaatatcgtttagcagaaaccctgcgcgcacagcttagcgccacgcgtgaacgtttcggtaatgcagtaacgcacctcgaagccgtaagcccactgagtacgctggcgcgtggatacagcgttactactgctactgacggcaatgtactgaaaaaagtgaagcaagttaaagcgggtgaaatgctaaccacacgtctggaagacggctggatagaaagtgaagtaaaaaacatccagccagtaaaaaaaagccgtaaaaaggtgcattaagccagcacgaattcaacgcgttttttgcttatcaagccatgcccgtgctgacagaagtaatctactgcaccacaggcttttaacacctgcaacggttgatggcagtctggacaaagagctttcatttcaataaattccccgcaggatcggcaacgcgcatggccgttatcctgatcaagcacatgctgacattgtggacaatgcagttccatatgaattcctccggtagccattccctctacattcatagagggaatggcagataaaatacttacggataattatttatttttcttgatgtgcttcatcagacgcttacgtttacgcatctgggttggcgtcagggtgttacgcttattcgcatacgggttttccccttctttgaactgaatacgaatcgggcttcccattacgtccaggcttttgcggaagtagttcatcaagtagcgcttgtaggaatcaggcaggtctttcacctgattaccgtgaatcaccacaatcggcgggttataaccaccggcgtgggcatatttcagcttcacacgacgaccgcgtaccagcggcggttggtgatcttcaacagccatcgtcatgatgcgcgtcagcatagaggtccccacacgacgggtggagctgtcatacgcttcacgtacactttcaaacaagttaccaacaccactgccgtgcaaggcagagataaagtgcacacgagcaaaatcgataaagcccagacggaagtccagcgtttctttcacctgctctttcacttcctgactcaggccatcccacttattcaccacaatgacaagactgcgcccactattgagaataaagcccagcaggctgagatcctgatcggaaataccttcgcgcgcatcaatcactaacatcaccacgttggcgtcttcaatggcctgcaacgttttgattacggagaatttctctacagcatcggtgattttgccgcgtttacgtacgccagcggtgtcaatgagcacatactcacgtccatcgcgttccattgggatgtagatgctgtcacgcgtcgtgccaggcatgtcgtaaacaacaacgcgctcttcaccaagaatacggttagtgagtgtagacttacctacgttcggacgacccacaatcgccagtttgatcggcagactttgcgggtcgaagtcgtcttcctcttcttcttcgccgttctcttccgcttcaaattgcgcccagtattcagcgtcttcgtcgacttcctcttgcggtgcgagatcttccatccacggcagcagcacatgctccagcagacttaatacgccacgaccgtgagacgcggcgatcgggtagatttcacctaaaccaaggctgtagaaatcaaccactgcctgatcgggatccagaccgtcagttttgtttgccaccaggaaggtcggtttttcacgggagcgcagatgtttggcaatcgcttcatctgccggcatcaggcccgcgcgcgcatccaccataaacagtacgacgtccgcttcttcaatcgccagcaggctttgttccgccatgcgggtttctacaccgtcttctgtgccatcaatcccgccggtatcaatacagataaactcacggccttcaatttccgcacgaccgtacttacggtcacgagtcagacccgggaaatccgcaaccagcgcatctcgggtgcgagttagacggttaaataacgtggattttcctacgttagggcgcccgacaagcgcgaccacaggtaccatgtttaaagcctcatttttataaatcatcagacaacgcacgctatattcgcgtcgttgttaaaaacaggaaaacggcccctgtccaggagccgttttcaaagtgaacgacagagacgattaacgtgtaatagagtacacggttccgtcttttgcctggatcagcagtttgccgtcagcggcaaccggttcagtctggaaaccggaactatcaactttttgctgggcaacgaaacgaccatcttcgacgttaatccagtgcagataaccttcactgtcaccgaccaccaggttgccattatacagcaccggagaagtcagcaggcgatgcagcagatcgctttgtgtccacagcgtaacgccgccatcaatggtcaacgccatcacccggtcattttgatcgaccagatagatgcgattgccgtcgacgatgaaatcattcacgctacccagttcgcgtttccacataatctgaccactgcgcagatcaagcgccgtcaggttaccattataggccagcgcgaaaacaacgccgttaacaacgacgggagtcgtgtcaacatcgctcagacggtcaatttcggtagaaccggtcgcctgggaaatacgctgctgccaaatcatctggccctgttccatcagcactgcgctgacgcgaccattatcgccccccacgacggccgcaccaaaagccgttgtcggcgcagactcgccacgcaaagagaggctaggcatatcgaggttaactgtccatttgacagcgccgtcagcttcgttcagcgcttgtaactgaccgttactggtgtggattaacaccagaccgtcgctgaccaccgggcggctaagtgcttcacccgcgactttagtttgccatgccacagtaccatcgctggtattcagcgcgtaaacctgcgccttttcgctgccaatgtagacatgcccaccagacacggtcacaccgccagaaagtaatgcaggctctttagagaaccagccatctttctcggccaggctgacagaccagatttctttgccatcatccgcattcagcgcttttactaaaccagcgcggtccgctgcatagacaacgttgtccgccagtgccggatgaagattggaatagaagttgccaatgccgctaccaacggaagtgctccacgccgtggtcggcgtaaactggttttcaacggttggcaatggggacatctttaccacatcttcttcgctgttaaacaggctacagccgcttaaaagggtaacggaaagcagtcctggcagcagtaatttacgcaattgcatcgggtccctctcagatggacaaattattaattttcatctgcatcatttcgctcagtgccggagtaacatcgcttttcacgcctgcttcccatgcactacgcgcaccttgcttatcacctttgctcagcaatgcttcaccacgcaggtcggcaacaatggcagcccacccttcacctttgatggtatcaagggttttcagcgcggcatcagcctgcttgagctgtacctgaacgcgagcaagacgcagatttatcacggctttgagattttcatcgctcgtgtctgccagcccctgttgtaactgggcggcagctttctctagttcatttttgtcaacaaattgctgcgcaagttccaaagaagccagcgcaccataagtatttttattttcagcagcaaatttttccgccgccgggatgctatccggtttgccttcgctcactgcggtaaccgcattttgataggcaagagaagcggagcgtgcagaatcaacctgatggctgttccagtagcgccagccaatcagtgcgccaacgcccaaaatcaccccaacagccagtgctttgccattttcagcaaaaaagcgtttaaccgcttctacctggtcgttttcgttctcgtaaatttccacgctgtccttctccttccttaacccagtaacgtgcgcaaatgcgcggctacgctatcctgcgcaactgccgtttgctcaccagagcgcaaatccttcactactgctgtgccgttagccacttcagactcacccagcaccacagcaacgcgggcaccccatttatcagcacgggcaaactgtttcttaaagttgccgccgccgtggttggtcatcaatttcacgcccggtaattcatcacgcagacgctcagctaatgccatagccgcagattgtgtatcagcaccactagccaccaggtatatatcgacaacaggatcggctttaaattccggattaacggcctgtactaacaatacaagacgttcgaggcccatagcaaaaccgacagccggtgttgcacgaccgcccagttgttccacaagaccgtcataacgaccgcctgcacacacggtgccctgggagccgagactgttagtcacccactcgaaaacggtacggttgtagtaatccagaccacgcaccagacgctggtttacggtgtaagcgatccccgcgctctccagcagtttgcacagaccggcaaaatgctcacgagattcctcgtccagatagtcacctaatgccggagcgtcgttgagaagcgcctgcacttccggatttttactatccagcacgcgcagcgggttagtgtacatgcggcgtttgcagtcttcgtccagcttttctttatgctgctcaaggaatgccaccagcgcatcgcggtaattggcgcgtgcttccaggctaccgatagagttcagctcaagagttacgtgctcggaaatacccagcgcgcgccaccagcgggcagtgagcataatcagttcagcgtcgatatccggaccttgcagaccgaaaacttcgcagcccaactgatggaactgacgataacgccctttctgcggacgctcgtgacggaacatcggcccgatataccacagacgctgttcctgattgtacagaagaccatgctcgatgccggcgcgtacacagcccgccgtcccttcagggcgcagagtcaggctgtcgccattgcgatcctcaaaggtgtacatctctttttcaaccacgtcggtgacttcaccaatcgcacgtttgaatagcggggtctgctctacaatcggcaagcggatttcactgtaaccgtagctgccgagcacgtttttcagtgtgccttcaatgcgctgccagatggccgtttcgccaggcaggtaatcgttcatgccgcgaatggcttgaatgttttttgccacgtttattctctttctgaatataaaaatgaaccctcaacgcttccctcaatgtttcgggagccatgcgggttcaatcatacacgggaagcgaggcgcttcccatcacgttattatttttcaacctgctgaacgtcaattcgacgcgcttcgtccagctgactggctttcgcacgaatgcgtgcttccagctggtcgatcatatcgttgttgtccagacggtctttgcgcacgccatcttcatagaggccgcttttcttgttgccgccggtgacgccgagtgtagaaaccagcgcctcacctgggccattcaccacgcagccgataatgctaacgtccatcggagtgatgatatcttccaggcgttgctccagcgcgttaaccgtaccgataacatcaaattcctgacggctacaggtcgggcaggcgatgaagttgatccctcggctacggatacgcaggcttttcaaaatatcgaaaccgactttgatctcttcgaccggatcggccgccaggcttacgcgcagcgtgtcgccgatgccttcagacagcagcagacctaaaccaatggcggattttactgccccgctgcgcgcaccaccggcttcggtgatccccagatgcaacggctgatcgatctgttttgccagcaaacgataagactcaacagcgaggaagacgtcagacgctttcacgctgactttgaactgatcgaagttcaggcgatcgagatgatcaacatgacgcatggcagattccagcaacgcctgcggcgtcggttcgccatacttttcttgcagatctttttccaggcttccggcgttaacgccaatacggatcggaatgtttttatcgcgcgcacagtcaaccaccatgcgaatacgctcttcattaccgatattgccagggttaatacgcagacaatcgacgccgtattccgctactttcagcgcaatgcgatagtcgaagtggatgtcagccaccagcggcacgttaacctgctgtttgatgagtttgaacgcttctgccgcgtccatcgtcggtacggatacacggacgatatcagcgccaacgcgttccagcgccttgatttgattgaccgttgcttcgacgtctgtcgtacgcgtattggtcatggactgtacggcgatgggagcaccatcgccaatcggcacattcccaacgtaaatacgtgtactttttctacgttgaattggagcctggttatgcatgaaaaatctcccgcgttacccgtctgttactgcgccggactttgttcggcattgagggtcagacgcgcaacctggttagttctgataaaacgactcagatcgacaggtttcccttgatactggatctgtactgcggctggcgcaccaattttcagtttgtacggtgcctggccggttaagttcaaattaccgtctttacgctgcataccgctaaacaattttttaccggtagcatcagtgacctccagccagcaatcggcagtaaagttcatcaccagcgcattcggatcagccaccggcgtggtcacgccagcctgatcggttggcaacggcgcagcaccatctggcgttgttgctgccgttggtgccggggtcgcggcggtatcaacatttgcctggctagggctaacaaccgcattctgttgcggatcaacagctggtgctggcgcagttacggcaggtgtttgcgtgttggttgcggtagtatccacagacgctggcggcgtggacgttgtagccgggtctgtagttgtgctcgtatttaatggaacactctgcccctgctcgctattactgctcagttccgcgctagattgatcggccatagtggtgatctcttcctgctgagctttgcggtcttgccaccaccaggcaccgctcaggccgataaccacaaacaacaccagccaagtgaaggtcatcagccagccgtcgcgttttttgcggcgtttaccgagggaaaaactctgcatcggcgcaacttttgcagcccgaagtggagcctgcttttccagccctggcagcagttcttcttctggaatatgtaccagacgcgcataagagcggatatatccgcgcaggaatgtactagcaagatcggcgggtgccttatcttcttcaatgtcgcgtaccgtggaaaccttcaggcaaagtcgctcggcaacggcctgctgactaagtcctagttgttcgcgagcattacgcaggcgagcgccggtagtaagtgcttcattttggtcgtgcgtggcttcagtattcattcgctgcaggtacgtttaaatgagaattgagatgccggtgaaccatcatgctcacccacaccgcgaaacatccgttaagttaaccgttatcatacagtataagaccgtctgtgtgctcgtgacaaagcccacattcactaaggctaacttactgttgcatcgttacatactgccttaaagtcagcaaaaacgcaccgttaatattgaccagacaattgcaacttaatacttcattcataaaacattacgccacggtacataaagtaaccgtggcgtaatggctatcagaccgctttaatgtcgatggcttcaccctgcatccgtttacgcagggtacgtttcgtacggtcgataacatcgcccgccaactgaccacaggcagcatcgatatcatcaccacgagttttacgcacaatagtggtgaaaccgtagctcatcagcactttactgaaacggtcgatacggctgttgctgctgcgtccatacggcgcacccgggaacgggttccacgggatcaggttgatcttacacggcgtatctttcagcagttccgccagttggtgcgcgtgttcagtgccgtcgttaacgtggtcaagcatcacgtattcaatagtgactcggccctgattggcgttggatttctccagataacggcgcaccgcagcaaggaacgtttcgatattgtactttttgttgatcggcacaatttcgtcacgaatttcgtcgttcggcgcgtgcagggaaattgccagtgcaacgtcgatcatatcgcccagtttatccagcgccggaactacaccggaagtggaaagcgtgacgcgacgtttagacaggccaaaaccgaaatcatcaagcatgatttccatcgccggaacgacgttgttcaggttgagcagcggctcgcccatgcccatcatcactacgttagtgatcggacgctgaccggtgacttttgctgcgccgacgattttcgccgcacgccacacctggccgataatttcgctcacccgcaggttgcggttaaagccctgctgggcggtggaacagaatttacactccagcgcacaccccacctggctagagacgcagagcgtggcacggtcgtcttccgggatatacaccgtttcgacgcgctgatcgccaacggcgatcgcccatttaatggtgccgtcagaactacgctgttcttcaaccacttccggtgcgcggatttccgccacctctttcagtttgccgcgcaacactttgttgatgtcggtcatctcatcaaagttgtcgcagcaatagtgatacatccacttcatcacctgatcggcgcggaagggtttttcacctaaatctttaaaaaactcccgcatctgctgacggttgagatccagcaggttgatttttccatctttcgtggtgacgttttcaggtgtgactaattgttcagacatatgctattccggcctcgttattacacgttatggcccctggagggttgaaaaaagaaacgccccggtgagcggctgctcgtccgggggcgctgcattgtacaaattctggcgcacggatgccacgtttgcacgcggcatttacgaaattattaacgggtgcgcgggcacacttcgccttcgccaaagaaataagcgatttcgcgagcggcagattcgacggaatcagaaccgtgggtaccgttttcggtcaggctgtcagcgtaatcagcgcgcagagtaccagccagtgcgtttgccggattggtcgcgcccagcagatcgcggtgacgctgaacggcgttttcaccttccagcacggaaaccacgatcgggccagaggtcatgaattcaaccagaccatcaaagaacggttttccatcgtgttcagcataaaagccacgtgcctgttcaacggtcaggtgcagcattttggtgccaacaattttgaaccctgcagcttcaaagcgcgcaaagatattaccaatgacgttttttgctaccgcgttcggtttgatgatggaaaaagtacgttcaatagccatttttacctctgtaaattgttctgttgttgtctgtaccagcgtacgagatggcgcggattataatgagcaacagggccgttgactattgatgaaggtaacatttttttaaaataaaatgagttttagcaacaatcagggacaaaacagattattgcatgacaaatttcactgtcgcgatttgccccacgtcatccatcaccagcaattgataatcacctttatccgtcaaatgcagggtcacgttgcgcccgcgttcagttaacggttcgccattcagaaaccaccagcgttcacctgcccctccactactttgcaacggcaaagtcgcttccgctgcgcccggtaaacgtttaataatcgcgccatcgcgaacgcctgtcagctgcagcgggagctgggcatcgtgaccgtatggcgggcaacttgtgctggccggtggtaagcgcacagcgcgacgttcacttgcgggcagccagggttccagcggtagcggccagacatttatcatttcttgtcgcgcttgcgggcaatcagcggcaacacgtttgccattttcatccagccagatggggaaacgaatgccattaatgccttcctgctccggcagtaatagagttggcggctgactcccgtccagcagccaggttgccaggcggcggcgacagttaccgtcaccttccggcaaagactgtccgcccggccagcagataacgccacgagtgacactgttcgggcgcgggtcttccggcagattcgcactgcggctcagtaagatattattgacctgattcaacaatggtacggcactggcaaagccaaactgaccaacaacgggcgtgccgtccggtctgccagtccagatcccaatgacatagcgagcgttaaccccaatcgcccaggcgtcacgatagccatagctggtgcccgttttccatgccagtggggcgacgcgcggcaaggcactatccggcaagggttgcgcttcatcagccataatccggcgaatgatccacgccgccccgctgctcattaaaggccgttcaagcagcggatcgtcaggctgtaagcgcaatttgcctgccttgccgtggcgagcaaacgcggtatacgctgccgccatatcttccagttttgcaccagcgccgccgagaatgagactaagattcggcgcagcaccgttgggcaaatataacggcaatccaacattgcgtaactttgccgcaaaccgtttcggtccataggcttccagcacctgcacagcaggtaagttcaggctgcgcaccagcgcctcgctcatgctgatcgggccatgaaaaccgctatcaaagttacctggtcgataatcaccggtgcgccgggggacgtcttgcagcagacttgccgggtggatcaagccttcatccagcgccagaccataaacaaacggtttgagcacacttcctgggcttcggatgctattgaccatatcaacatgaccaaagcgactatcatcgttgagatcaacgcttcccacccagccgcgaacacgcatatcggtatgatcaaccacgatcatcgccagactgctgcgcggtggcaaccgccctttccagttttgcgccagttcttccagacgtcgttgaagaccggcatccaacgtagtagtgattttgtcgcttttgcttttaccgagcatcatgcggctaaacagcggtgccagttgcggcatttgtcggggggccagccagatgggttcttccctactctcttttacctgctcacgggaccacacaccttgcacggccatccgttcgagcactttattacgcgcggcttcggcacgctccggccaacgatccgggcgaagacggctgggcgcttgcggcaaaaccgccagcattgccgcctcggaatagcttaaattcgcagggctttttccgagataagcccaacttgccgcaccgatcccctgcaacgtaccgccaaacggagcgcggttaagatacaaggtcagaatttcacgcttagacagatgccattccagttgcaacgcgcgccagagctggcgaattttgccgccaaatgttttggggtgaggatcaagcagacgagcaacctgcatagtgagcgtgctgccaccggaaataacccgtccgctagtgagatcttgccatgctgcgcgcgccacgctgaatggattcacccccggatgcttccagaaccagcgatcttcataattgatcagcgcttcaaggtaacgtggagaaacatcttcgattgttaccggataacgccagatgccgtcagcatcggcgaagcgccagagcggcgtaccatcctgcgccacgaccactcgtgcgggattgacttcatgcagcggtagaggccagagtttatctgctccccacgctgcaagaaaaaggagaaagggcgcggctgccaacgttatccagcagccgcgtttggttaacaagcgaggcatttacggtctgacaatcagcagatcttcagccgcgccggtcgcccgccattggggaacatacatactttccaccatcggttgcggtacctgatacgttcccggcgtcaccgcccgcgccagatacaccagcgttaccggttggtattcatcaacggcaaccgccgccacaaagcgatcgtcacggaactcaatgtgcttaatgctcgcctgctgcatctggttcagtaagttctgcacttcgccaccactttgctccaggctggcgctaccgttcgccagattctggttttccagttccagacccgcaggcagcagatccacgactaacgcatccggcacgctgttactggcttttacctgcaaccacaccagcaccagatcgccgctacgtaagctgtccaggcttttgctcttaccatcagtaccaagaatatgacgctcgatttgcagcacattgttcgccggtaaaggtgcggattgcggataaccgctggcatccatacgcaaccataacggctgatcgccactgttgctcacctgcaaggtgacaagttgatcgctattcagattgctgttttgcgctttctcgcctgtcagctgctcagcactgaaagaggtttgcgcctgccatttaccgggtaaatcctgaatcgtacgggcagccaggaacaacgcgttactttcctgcgtgcttagccagcgttcaccaaacgcctgctggctaagtgtgttcagcaaagtgtactgctcatcgggtagcagtttattttcttccagcaaggagagcattaacgcgttgtcgcgcagactactaccgtaatcacccagccatatccgctcatcactattacgcggcgttttcagcgccagcgcaatcgcttcttcaccacgcgtcgcatcacccatggttttcagcgcaacgccaagttgcagcagcggtaaaccagaagcggcatctgcacgatgctcccagatttcacgcagcgcacccagcggagccttttgctgacgggccaacaccagcgcagcgtaagactgtacggcgaatttactggctttgagattatccgcgtacgggatgctcatcatgcccggatcttgtaaatagcgcagcagacgctcattaccccggttaatggcgtctgtcggcacgctgtaaccctgttcgcctgcgcggaccaggaaatccatcacgtaagccgtcagccagtactcttcgtcaccgtttttatcccacagcgcaaagccgccgttatcacgttgcatttgcagcaaacgggaaatgccgatatcgacgcttgcacggcgtttctcatcactgtcgcctttgatgcccaacgcctgcagttgggctgcgttggtataaagactcggaaacaggccgctggcggtttgctcaagacagccgtacggatacgcttttaactctttgatataacgtgcgatgttcagcggtggtttgccgctcaacaacaattgcccttccagcgtaacagggctgaagttttgcaatccatccgccggaatcgcccatgtctcaccaggctgtaacgccgtaccgtaattaaccgtttgtgccgggaacgccggacggacgccgattttccactgcttatgctgatcggcaacggtttcacccggtaacgctaacccgctaatggtggcctgaatttctccatcgccataacccggcaatgctcgcaccgggataaacagcgtagtacgcacacctggcgctaattcaacggctgcgggactatcgctgaccagttcaagcaaaccactggcggtcagggcaacgttcagtttttgcggtttatcggtaagattagtgatatccagcgtcagacggctggtatcgccactcgccataaagcgcggcatgttcagttcagcaatcaccggtgcggcaactatcactttactttcgttgctaccgaagtcatctgccgtccaggcttgcgccatgacgcgcaattcaccgttaaaatcgccaatcggcagtgtaacgctgccttcgccctgttcgttgagcgttaccggcagcgcctgctgcacgacaatattgacgtgattgaccggcggtttaccaccacgtttcagctcatcaccatcgccaccgaaacgcagagctgccagacgcccctgaccttcaataacctgaccgtaaatatcgtaaatgtctgcgccatagcgtttctgaccaaagaacgcctgccacggatctggcgtgacgtagtcagtaatattcagcacaccactatcaacggcagacaccagcacattcacctgtttaggcttctcgccatttttagtgctggctttaattttcacggttaatggttgattgggacgcatttttgctggtgtttccagcgccagatcgaggcgacggttttcatcgccaagcggcagatgcaacacaccaaccgcgcgttttggcgtcgcggagcgagatttatcgccaggacgtaccaccagcgtacttaaatacagatcatgacgattccaggttttatcgaccggaatcgtcagatccagcccttgagcccgaacatcaatctcttgccaccacagcggcccttcactggactcgaccatcgcataacctttacccgccgttggcgcggcgatatgcaacttaatggtgtcgccagggcgataactggctttatccagtttcagcgtgacacggtcgggtcgcactgcgccgctaccgtcgctgttgtcctgccagctatagccagcccagaaacgaacactactgaccgcttcattcggcgctttgacttccagacgataagcgccccactctaccggaaaactgaccttgccggtttcgtccgctttcagatccagagtttgttcattttcgatcagatctttttgatcaaactgactctgccagccttcatcttcactccagttccagtagtaatcgcggcgttcgcgaatcaggcgcacctgcaagccgctcacggcttttttcacgccttgcgcatcgctataaacgatgtcaaaagcggcgttactgccttcatcaacaatgggctgtttcaccgtgctgtcagtacgataatcgtaaacgcttttgctggcgaactgcggacggatccccggcaatgcatcggcaggccagatagcctgctcagcgcggcgcgtcaccgggcgaccgccgctttccagcaaactaccctggaaaataacctgtaatggggaatgcgtttccttccactggctttctgtagaaacttcgccgcgccctttatcatccagcgtcaactgaacttcatccagcgtgcgggaaagattttcggcagctatatcgccgaattcaaaaccaggtaaggcactcacagcttcacgcagtgggcgcaggaaaagttgcccttgcaaagtattaccattagcaggtgcaccatacaggtagtaccccaccacggagaatttcacttcatctttcggcgttagcggggttttctcaccggtcagattcagcgccatgcgctctggcataaaatcttcgacgtggaaatcccacatccgatactgattatcgcccgtgttagcgcgaatatgccacataccggttgccgcattgctatcgagtggccaggtaaagtggtagaggccattctccggctgactaacgacgctcctgagtacctgcccatcgggtttaatcacgtctaacttgatgggttgattgggcaacgctttaccgtctgcatcacgcagcaaaccattgaggattaccgtttcacctgggcgataaagatcgcgtgggccaaacatgaaaaactgtttgctatagcctggcgcgccagcaatgttaaattctgctaagtccagcgccggaagttttaaatcgagtagcgttgtctgaccgtctttacgcgccaacagtaatgccgcgtttttatcattttccagctgcacatgcccctgagcgtcactggttgcctgagtcagagtctgccctttctcatttaataaagagacttcaattccttgctgggccgcgccgttttccagactttgggtaaagatatccagacgattgtgataacggtgagcactaacgccgatatcacttaacgtaaacagcgtcgcgggattactgtaatcgtaacgtccagcctgattcatcacagccagatacacgcccgcctgctgaagcggtttgatatcgcccagcggcagcaataatttttcacgggtgttacgcgcaggattgagatcaaaccgtccggtgtagaccagatccgccatctgcagcagtttgtcactctgccagttcgccaggctattgcggtattcccattggctaatgaatgctggcagagattctggcttaacgcggaagaagttaacatcgacattattaacgttgagcgccattaccggcagcccttcaacgactttgccaggcagcaggctaccacggctggcaaaaccgacgctgggttggatgtcgcgggtagttatagttttttcgtaatctttactgaaggttgcgttgttgagtgctttgacctccttgccaatagtaacgatcaaatcacgtttcggttcgaggtggcgtaaacgtaactctttaagattatcactcagctcccaggcaccatccactttgccgctttttttatcgacgacatgaataacgcgactgaaatcctgatccgggtcgagagggatggagaacgtcagcaccagcgtggctgcaccatcaagttggacttcagagagatccagcaatgtcagcaccttaccggcactctgttgggccagtttttgtctctccggcacggagagttttgcactactcgcgttttcactagaggccgctttagtaacttcagaaggcgcatcttttttcaccgctgttggcgcgttatcgttgttgtcgcaccctgccagcgccagcattagcatgcaggcggctacgcgtaactttttcatttttcatccctgccacaatggcccgttagcaacgtcgaataattattatgcgtgagaatttacgttatgtaattcagtatcacgcccatacaatccgaattttagtgagaattgtggctcagacagccaaatcagcctcttttgcttgtcgcttttcactaaacatccgacaatttagcctaaccccggcaaaaatggagatgcctatgtccacgacatggtttgtaggagccgactggctcgccgaacatattgatgacccggaaattcagattatcgatgcccgcatggcgagccctggacaggaggatcgtaacgttgctcaggagtatctgaatggacatattcccggcgcagtgttttttgatatcgaagcgctttctgatcacacttccccgcttccgcacatgctgccgcgcccggaaacgttcgccgtggcgatgcgtgaattaggcgttaaccaggataagcacctgattgtctatgacgaaggtaatcttttcagtgccccacgagcatggtggatgctgcgcacctttggtgtagagaaagtgagcattctggggggtggacttgcaggctggcagcgcgatgatctgctgttagaagaaggtgcagtagagctgccggaaggagagtttaacgccgcgtttaatcctgaagccgtggtgaaagtaaccgatgtattattggcaagccatgaaaatacggcgcaaattattgatgcccgcccggctgcacgttttaacgcagaagttgatgaacctcgcccaggtttacgtcgcggacatattcccggagcactgaatgttccgtggacggaactggtgcgcgaaggcgaactaaaaacgaccgatgaactggatgcgatattttttggtcgcggcgtcagctacgacaaaccaattatcgtcagctgcggctctggtgtaacggcagccgtggttttgttagcactcgcgacgctggatgtgccaaacgtgaaactgtacgacggcgcatggagtgaatggggcgcgcgggcagatttaccggttgagccagtgaaataagtattttacaggcaataaaaaaccgccgaatttggcggttttttattgctagtctggttcgcggcctttccagcaggttgacttgtgttacatgagcaacgcaggtgcttcacagcaaaacaatactcaccagtaactctctttttgtcaagcaaaagagagtaattattgtttatttagcgtattatcgacaccggccctttccgccgtgttcggtaataaaataacctggcttattagtccgaattcagacaaatataaataaatcctgctcaaaattaaaaattctaaccggtaaaagatattacttaaacatgtaaattcactttcctttaaaaaacaaaaaaccgccaaaatcaggcggttttttgttgctggtccggttcgcggcctttccagcaggttgtattaccgtagtaatgcaagcgcgtctcagcggagacaatactcgccagtaactctctttttgtcaagcaaaagagagttattattgttctgttagtgtattatccactgcggccctttccgccgtctcgcaaacgggcgctggctttaggaaaggatgttccgtggccgtaaatgcaggtgtttcacagcgcttgctatcgcggcaatatcgccagtggtgctgtcgtgatgcggtcttcgcatggaccgcacaatgaagatacggtgcttttgtatcgtacttattgtttctggtgcgctgttaaccgaggtaaataataaccggagtctctccggcgacaatttactggtggttaacaaccttcagagcagcaagtaagcccgaatgccgccctttgggcggcatattttagattatccgattctgtttaaagtcacgcaaaaaaccaccccagcgacgttcatagaatggcgcaatatgttcggtaataaagtggctaattcctttttccccttttttcacctgacaaatatcgattggttcatcgccaggtaatgtatcggtcgctacacttcccgtcgcctgaataatttcttcgatatcaccatcggcttcaatgccaataagtaaattaggctgtgcctcttcgttctctttaatactacaaataaaagcacgcttcaccggcttaatggttttaaataaggtggtgagactatcaatcatttgtgctggcggctctgcgacttcgcttaatatcaggctttcaccgccttccaggatttcctggctgctcagcggatttccctcttcaccaatcaacaaactgatttcacgcggcataaattctttaccggttggcagtttggcattaaggaagagcgtttcgccaagtgtcatctcaaacagcgtgcgaacgggcattacgacaaatgcctgttcgtcttcaaccgcctgttgaagtgcttctaagctggtgaaaaaaggaatgacgctggtgccgtcttctttttcccagtgctgtaaatcaagcgcgctatcttcaaccacagcctcgccctgcgccgccgtaccaggcacccagacggtggattccagtagagtacggaaaaaggccgggcggtgcgccggttcagttgctgctttttccagcaggtcttcaagttcgttttttgtttcggacataagaaccacaattcattcaacgttcggggcgcaaatgcctgatgcgctacgcttatcaggcctacaagggattcgcaatttgttgaatttgcagaatttgtaggccggataaggcgtttacgccgcatccggcatattagtttacgccgttaacagattagctatcgtgcgcacaccaagtcccgtagcgcccgcagaccactgttcaaccggcgctttacggtaagtcgcgctgcagtcgatatgcagccagccttgctgatagttctcaacaaagtggctcaggaagcccgccgccgtgctcgcgcctgccggatacgccgcgcttccggtattgttcagttcggcaaagttagacggcagctggctgcggtggaactccgccagcggcagacgccagaacggttcgttctcctgcgcggcactcgccagcaagcgaccggccagcgcatcgtcaaaactgaacagcgcgtgataatcattacccagcgcagttttcgccgccccggtgagggtcgccgcatcaatgatcatttccggtttctgcgcactggcatcaatcagaccatcggcaagcaccagacgcccttcggcatcagtgttcatcacttcaacttttttaccgttgcgataggtgatgatatcgcccagcttgaacgcattgccgctaatcaggttatccgcacagcagaggaacagcttcacgcgcttgttcagtccgcgcgtaatggcaaatgccagcgccccggtaaccgttgccgcgccgcccatgtcgctcttcatgctgtccataaacgcagtctgtttgatgctgtagccgccggagtcaaaagtgatacctttacctaccaggcacgcgtacactggcgcttctttatcgccagttgggttgtaatccagcgccagcaataccggagaacgttcactaccgcgtccgactgtgtgcagccccatataaccttgctcacgcagatcttcgcctttggtgatccgataagtcacacgatcgcccgcgacgttgctgatcagatcaacagcacgctgtgccagttggcttggtcccaattcttctgccggtgcgttgatggtgtcacgcacccagtcgatgatcatcaggcggttatccagttcctggcgctgggcatcgtccagatccggccacaccactttacgcgtgcctttcggggctttgtaaccttgccagaatgcccagcagcgatccgcatcccagccttcaccgcttaactgaacatgcttgatgcccagaccgtcaatcttgcgcgccgcacgctggatcagccccagatcgtctgccccgttcaaatgcagggtaatgccgtcattattaatgctgtaagttgctttttctccccagcgcgcgtcggcaggttgggtagagagggtaatcttcatcgcttctgtcattttagttatccttctttgtaaaagggccgccagttggcagccccaggatttttccgctaaatgattcgcgttgcaggaaggcggcaagtgagtgaagccccaggagcatagataactatgtgactggggtgaacgagcgcagccaacgcatctgcggcgtgaagcatgacgcggaaattattcggcctcgtccagccagactaacaaaatcgcttcgaggattttctcgttggatgcctgcgggtcgtcgtcgaaatcttccagatcgcaaatccactgatgcatatcggtgaatcgaaccgttttcggatcaagatcgggatacgcatcgtacagtgcttcgccaatttcgcggctatcggtccacttaagtcccatactaacctctgttaatgctcacgcgcatggttgatagtgtaacgcgggatttcgactactaaatcttcgtcggtaacgcgcgcctggcagcttaaacggctttccggctccagtccccaggctttgtccagcatgtcgtcttcctgctcactgctttccggcagactgtcaaaaccttcacgaacgatgcagtggcaggtggtgcaagcacaggatttttcacaggcgtgttcaatctcgataccgttacgcagagctgcgtcgagaatggtttcaccgctattagcttccagaacagcgccatcagggcagagatcctgatgaggcaaaataacaatctttggcatattaaacctcgtccacggaatggcctttcagcgcacgacgaacgctctggtccatgcggcgagcggcgaaatcctgggtttgtttgtctacgtttttaatcgcttgttcgatggcgtcaacatcatcgccctgcgccacttcactcaggtgagcggcagcatcgtcaatgacctgacgttctgcggcgcttaacagcgcggcatcagcagccagcgcgccgtgcagactttccagcacacgcgccgcttctactttttgttctgccagcattcgggcttttacgtcctgctcggcatagctcatactgtctttgatcatgctagcgatttcgctatcggtcagaccgtaagacggtttgacctgaatagacgcctcaacgccggtggatttctccatcgccgtcacgctcaaaagaccgtcggcatcgacctggaacgtcacgcgaatatgcgcaccgccagccggtagcgccggaataccacgcagcgcaaaacgcgccagactgcggcagtcctgcaccagttcgcgctcaccctgcattacatggatagacatcgccgtctgaccatctttaaaggtggtgaaatcctgagcgcgggccaccggaatagtggtattacgcggaatcactttctccaccaggccgcccatcgtttcgaggcccaggctcagtgggatcacatcaagcaacagcatttcgctgtctggcttgttacccaccagaatatccgcctgaatcgccgcgccaatagcgacgactttatccgggtcgatggaagtcagcggtggacgaccgaaaaattcgcctacccgttcacgcaccagcggcacgcgagtagaaccgcccaccatcaccacttccagcacttcatcagcttctacacccgcgtctttcagcgcgcgacgacaagccagtaaggttcgttttaccagtggcgcgatcagttcattgaattgttcacggctgatttcgccctgccagcccgcaacgttaacggtcacggagtccgcatcgctcagcgcgattttggctgcaatggcggcatccagcagttcacgctgaacgcggttatcgctacgatcaggaatgcccgcctgctcgcgaatgtaatccgccagcagatggtcgaaatcatcgccgccgagcgcggaatcaccgccggttgccagcacttcaaacacgccgcgacttaagcgcagaatggaaatatcaaacgtcccgccaccgaggtcataaacggcgatcacgccttcctgaccggaatccagcccgtaggcgatagccgcagcggtcggttcgttaagtaagcgcaggacgtgaaggcccgccagacgcgccgcgtctttggtgccctgacgctgggcatcgtcaaagtacgccggaacggtgataactacaccatccagctcgcctgccagggcttcagttgcccgcgccgccagtgctttgaggatgtccgcagaaacgcgcaccgggttcagcagccccgccgccgtttcaatcatcggcaggccgttttcgctggcctggaattgataaggcagatgcggatagcgttgctggatatcagccaggctgcgtcccatcaggcgtttaacagaactaattgtgttggcggtatcgagcgctgcattagtacgcgcgtcataacccacgctatgcccttgctgttgatagtgaacaacagatggcagcaggtgacggccttcatgatcggctaacgtttcggcctgaccgctgcgcactgtcgccaccaggctgttggttgtgcccaggtcaataccggccgccagacgacgctgatgcggcgcagcactcaaaccaggttcactaatttgtaataaggccatgtttagcttccagaaattaaaaatcgagcagtttttcttcgagttgttcggcactgcttcgcagtttatcgagaaaacgcagcttacgcacggtatccgccgccgcgtcccacgtctcgttgtctaactgttcaaccatcaactgatggcgggtatcaaacatctttttcacacgtttgataaagctttccagccgcgcttcatctttcgcctgttcgatctcgtccagctcttcgcgcagctccaactgttccatcaggaacgcggtgtcgcgcacagtatgctgctcgctggcgagatcaaagccgtgcaaagaaagcaaatattccgcgcgcattaacggatgacgcagcgtttgccaggcctggttaatggttgcagattgctgtacggcggcgagttgttccgcctggcttccgctggcgaatttatcaggatgatactgacgttgtagatcctgaaaacgcaggctcagcgcctgggtatcgagttgatagcgggcaggcaagccaaagagggtgaagtaatccataacattctcagggctgcgatccgccgcgataacggcgaatcaggtaaaacaaaccccacgcgcaggcgaccacggtggggttatcggtatgcgcatcaaacgtggaagctttcgccgcaaccacactcatctttgacgttcgggttggtgaatttaaacccttcgttcaggccttcttttacgaagtccagctgcgtaccgtccagaaattgcaggctcttgccatcgaccacgactttcacgcctttgtcttcaaacacgatgtcttccggcgtcggttcgtcaacaaattccagtacataagccataccactacacccggaggttctcacgcccagacgcaggccaaaccctttaccgcggttagccagaaaggtatttactcgcgctgctgcactgtcgctcagtgtaatgctcataaccaaacctcaactcttattttgcttcacgtttgcttttatagtccgcaatggcggctttgatcgcgtcttctgccagaatagaacagtgaattttcaccggcggcagttcaagttcttcagcaatatcggtgtttttgatcgcctgcgcttcgtcgagagacttccctttcacccattcggtgaccagggagctggaagcgatagcggaaccgcagccgtaagttttaaaacgcgcgtcttcaatgataccttcatcgttgactttaatctgcaacttcatcacgtcgccacaggccggtgcccccaccatgccgctgccgacgttctcgtcgttgttgtcaaaggaacccacgttacgcggattctcgtaatggtcgataactttttcgctgtaagccattataaattctcctgattccgataccgattaatgatgagcccattcgatgctgttcagatccacgccctgcttgtacatttcccacagcggagaaaggtcacgcagacgaccgatggatttacgaactaactcgatggtgtagtcgatctcttcttcagtagtaaaacgacctaaagagaaacggatagagctatgtgccagctcgtcgttcagccccagcgcgcgcagcacgtaggacggttcgaggcttgcactcgtacaggcggaaccactagaaactgcgaggtctttcagcgccataatcaggctctcaccttcaacgtagttgaagctgacgttgagaatgttcggcgcaccgtgttccaggtcaccgttcaggtaaacttcttcgatatctttgatgccgttccacagacggttacgcaggccgcgcagacgttccatctcggtcgccatctcttcttttgcgatgcgataggcctcgcccattccgacgatctggtgaacaggcagagtgccggaacgcataccgcgctcgtgaccgccgccgtgcatttgcgcttcgatgcgtacgcgcggtttacgacgtacatacagcgcaccgatacctttcgggccatagattttgtgaccggagaaagacatcaggtcaactttcaactggctcaggtcgataggcagtttacccacgctctgggttgcatcaacgtgatagataatgccacgagcacggcacatttcgccgatagccgcgatatcctgcaccacgccgatttcgttatttacgtgcatgatggacacgaggatggtgtcgtcacgcatcgctgcttcaagttctttcaggtcgataatgccgttacgctgcggtgccaggtaggtgacttcaaaaccttcgcgctccagctgacggcaggtatccagtaccgctttgtgttcggttttgctggtgatgatgtgcttgccttttttctgataaaagttggctgcacctttgatcgccaggttgtcagattcggttgcaccagaggtaaagacgatttcacgcggatcagcgccgaccagatcggcaatctgattacgggcgatatctaccgcttcttcagcctgccagccgaaacggtgagaacgggaggccgggttaccaaaggttccgtccatcgtcataaactgcatcattttctcggcaacacgcgggtccaccggcgtggttgcggagtagtcgagataaatcggtaatttcattgctctataaactccgtacatcactcaatgcaaggaatcaggctaccggctggatgtacgaccgtgtttacggagtatttagcactccggcctgattctgaattctttttattaagcgcgtaacttaacgtcgatcgcgtcttgtgtgcgggtgcgtggcgcgtcgtgagtatgctgacgaccagacacatccagcacttcctggttattaaccagttcgcctaaagtaatgttgttgagaaaaccggtgagacggtcgctcaaatcacgccacagcgcgtgggtcaggcatttatcgccgccctggcagccgcctttaccctgacaacgggtggcatctacagattcgtcaacggcgctaattacttcgccaacggcgatgctgctggcatctttgcctaacagataaccaccgcctggtccacgtacgctggaaaccagaccatttttacgcagacgggaaaacagttgttccagataagaaagggaaattccctgacgttcggaaatatcagccaacggtaccgggcccgcttcagagttgagcgcaacgtcaagcattgcggtcacggcatagcgccctttagatgtcagtctcatgtcttacttcacctcaaactcgcccctgcccggggttttttattgtaaaagtgggggtattgcatagcagggtcaagtctgacattcccgagtaaattggtcaactatttacttgactgatttagtcgggtatttaaccttcagtgccatttttttatcgtggcgtttgtacctgttgtcggatgcggcgtgaacgccatatccgccctggggttctgtacactgtaggcctgataagacgcattacgcgtcgcatcaggcaacggctgtcggatgcggcgtgaacgccttatccgacctacggttctgttcactgtaggcctgataagacgcattacgcgtcgcatcaggcaacggctgtcggatgcggcgtgaacgccttatccgacctacggttctgttcactgtaggcctgataagacgcattacgcgtcgcatcaggcaacggctgttattcggccttgttacctttattctgctgctcaatagaagccagaatcccgcgcaggatattcaactcctggctttccgggcgcgcacgggtaaacagacggcgcaatttattcatcacctgccccggatggttttcacggataaaaccggttgccagcagcgtttgttccagatgaccataaaaacgctccagatcatcgaccagcggatacggcgtctcttcatgctcgacctgctcgccgttttcctgagttgccagccaggccatgcgcacttcataggcaataacctgaaccgccatcgccaggttcaggctgctgtattccgggttagccgcaatcgcgacatgataatggcatttctgcaactcttcattggtcaagccgacgcgctcgcgaccaaacaccagcgccaccggggtatttgccgcttcagcgacgcttttcaggccgcattcgcgcgggtcgagcatcggccatggcagcgtgcgggaacgtgcgctggtgcccaccaccaggctacaaccggctaacgcttcgtcgagcgtatcgacgatgtgagcattaccaatcacatcgctggcccctgctgccagggcaatcgcctgggagtcgggtttcaccagtggattaaccagccacagattggttaatcccattgttttcatggcacgggcaacagaacccatattgccggtgtgactcgtctccaccagcacaattcgaatattttgcagcattgtctttcttcatctaaagattattcacgcatcttatcataaaacgaagacagatgccgatctcgctgctatactctgcgccgttttcccgttctttaacatccagtgagagagaccgatgcatccgatgctgaacatcgccgtgcgcgcagcgcgcaaggcgggtaatttaattgccaaaaactatgaaaccccggacgctgtagaagcgagccagaaaggcagtaacgatttcgtgaccaacgtagataaagctgccgaagcggtgattatcgacacgattcgtaaatcttacccacagcacaccatcatcaccgaagaaagcggtgaacttgaaggtactgatcaggatgttcaatgggttatcgatccactggatggcactaccaactttatcaaacgtctgccgcacttcgcggtatctatcgctgttcgtatcaaaggccgcaccgaagttgctgtggtatacgatcctatgcgtaacgaactgttcaccgccactcgcggtcagggcgcacagctgaacggctaccgactgcgcggcagcaccgctcgcgatctcgacggtactattctggcgaccggcttcccgttcaaagcaaaacagtacgccactacctacatcaacatcgtcggcaaactgttcaacgaatgtgcagacttccgtcgtaccggttctgcggcgctggatctggcttacgtcgctgcgggtcgtgttgacggtttctttgaaatcggtctgcgcccgtgggacttcgccgcaggcgagctgctggttcgtgaagcgggcggcatcgtcagcgacttcaccggtggtcataactacatgctgaccggtaacatcgttgctggtaacccgcgcgttgttaaagccatgctggcgaacatgcgtgacgagttaagcgacgctctgaagcgttaatgactcaggcgggtgatatcactcacccgccctcgcctttcaggcgctattccgaaatacttcctcactgctttactttctttcgtcactctcccaccatctttccccgattaatggatgataaagaagagccaaggaaaggttatggcactgccagtgaacaaacgcgttcccaaaattctgtttattctctttgttgttgccttctgcgtttatttagtgccgcgcgttgccatcaacttcttctattatcccgacgataaaatttacggtcccgatccctggagcgcggaatccgtcgaatttacggctaaggacggtactcgtctgcaaggctggtttatcccttctagcacgggccctgctgacaacgccatcgcaaccatcattcatgctcacggcaatgccggaaatatgtccgcccactggccgctggtcagttggttacccgagcgtaatttcaacgtttttatgtttgattatcgcgggtttggtaaaagtaaaggcacgccgtcccaggccggattgctggacgatacgcaaagtgccatcaatgtggtgcgccatcgcagtgatgtaaacccacaacgtctggtgctgttcgggcagagtattggcggggcgaatattctggatgttattggtcggggtgatcgtgaaggcatacgtgcggtgatcctcgactccacatttgcctcttatgcaaccatcgccaaccaaatgatccccggcagtggctacttacttgatgagagttacagcggcgaaaattatatcgccagcgtcagcccgatcccgcttttactcattcacggtaaagctgatcacgttatcccatggcagcacagcgaaaagttgtatagcctggcaaaagagccaaaacggttgatcctaatcccggatggcgaacacattgatgctttttccgatcgtcacggcgatgtttatcgcgaacagatggtggactttatccttagcgcgttgaatccgcagaactaacccatgatcgctagcacgataatcattcacaaaaccaccttaagacatgctaatccactggtcagaacagtttaagatgagaaaaattctgtgacgcttgccaacatttctgatgattagcattcccttcgccatttccttgagcaaactttagctattcttatcaattatgcttatgggagatctacagatgatgcctacgcttgctccaccatctgtccttagcgctccccagcgccgctgccagatcttgctgacgctctttcagccggggttgaccgccaccatggcaaccttcagcgagcttaatggtgtggatgatgatattgccagtcttgatatcagcgaaacaggacgggagatcctgcgctatcatcaactcacactgacgactggttatgacggtagctaccgggttgaaggtacagtgcttaaccaacgtttgtgtttatttcactggctacgacgtggtttccgtctgtgtccgagttttattaccagccaattcacccccgccctgaagagtgaactgaagcggcgcggaattgcgcgtaacttttacgacgataccaatctacaagcgttagtgaatctctgctcccgacggctgcaaaaacgctttgaaagccgcgatattcatttcctgtgtctgtatctgcaatattgtttgctgcagcaccacgctggaattacgcctcagtttaatccgctccaacgtcgctgggcggaatcctgccttgaatttcaggtagcgcaggaaattggacgccactggcagcgtcgggcgctccagcctgtaccacctgatgagccactgtttatggcactacttttttccatgttgcgggttcccgatccattgcgggatgcgcatcagcgggacagacaattgcgtcagtctatcaaacgtctggtaaaccattttcgtgagctgggaaatgttcgtttttatgatgaacaggggttatgtgatcagctttatacccacctcgcccaggcgttaaatcgcagtttgtttgccatcggtattgataataccctgccggaagagttcgccagactgtacccacgcctggtgcgcaccacccgcgcggcgctggccggatttgaaagtgaatacggcgtccatctttctgatgaggaaagtggtctggtcgcggtgattttcggtgcctggctaatgcaggaaaacgatctgcatgaaaaacagattattcttcttaccgggaatgatagcgagcgagaagcgcagattgagcagcagttacgcgaactaacgttactgccgctcaacattaagcatatgagcgtaaaggcatttttgcagacaggcgctccgcgtggcgcggcactgattattgcgccttataccatgccattaccgctctttagtccaccgctgatctatacggacctgacgctgacaacacatcaacaggagcagatccgcaaaatgctcgaaagtgcatgatcagcaactgggaacaactttcgggcgcaaaaacattgccggaagcgccaccagcgccattacccagaacacgccgtggcccagatattgatacaggaaaccggcgaaaacggtcatgatagcgatactgccgcccatcgcgacggcagagtaaaccgcctgtaaacggatgacttcgctaccctggcgagcagcaatataacgcatggcggccaggtggcagaccgtgaaggtgccgcaatgcagaatttgcaccactatcaaccacggcaacgccgtagttgctcccataatgccccagcgcactacgccgcaaatcgcgctgatcaacagcatatcgcgtgcactacaacggcggaaaagtttattactcagcgcaaagataatgacttccgccaccacgcccaggctccacaaataccccaccgcgctggcgctgtagccagctgcctgccagtaaatggcgctaaaaccgtaataggccgcatgtgccccctgcaataaacaaacgcaggccagaaagcgccagttctggcgaaccagcgccaaccacgcagaccaaccggtgctctcctgctggcgacttgccccttgtggctgaatcgtcggacggatgagaaagccgagcagcatggatgccacgcccaacgtcaacagcgcgaggatcacccgataatcaaacatagtgaccagtttgcccgtcagcgcgctgccaatgacaaacgccacgctgccccacagtcgcactttgccgtaatcaagcgggaactgcttttgccacgtattcgccagtgcatcggtcaacggtaccagtggactgaaaaagaggttaaagccaatcatcaccagcatcagccacgctacgtgcgcccccgcccagaaggcgacagcaaagagaagtgtcagcagtgccagcacgcgcaaggcggaaatcaggcgggaaggatcgctgacgcggggcgcgatgagcaaactcccgaggaaacgggcaaccagacctgcccccaataacaggccgatggtttctggcgttaaaccaatccctttaagccagacgctccagaaaggtagaaaaatgccgtaactaaaaaagtatgtgaaatagccgagcgccaaccagcgcgtggattgcaaaaccatgagtccctcccgtcaggaggcgttagtctggggttaatcgaatgttggtgcaagttgaaaaataagaatattcgagcctgcttcccgatgtctgtaacgccagttcacaagcactaaaaaactgagatccgcgacgcatgttgcaaaaataatgcgtaattatgccgttacgcttgccaaacgttcctgcacaatggcgatgaaatcgcgtaatgccggcttcatctcccctttcttccacgccatcagtaaagcaatggaaggcacatttccggcaatgggacgaaaaacaacctgtccggtattaaaattattcatataaccgggtatcaaagtgacgcccagccccatgcccaccagattcatggtcaccagaatattcgttgccacctggacgatatttggctggctgttttcttgcgcaaaccacgctttaacgatcggcgcaaggctaccggaatacaccggatcggtactgacgaaattcacgccatccagttgcgcggcggtgatctctttttcatgtgctaaagggtgatcaaccggtaacacaaccactaatggttcgtcaaaaagctccagataatcaatctccgggctataaacaggatggcgcattaagccgacgtcgagttcaccacggcgaattttttcctcctgttgcgtggtgattaaactcaccagctcaatcaaggtgtctggctgtctgagacgaaacatcggtaatacttttggcagtaaattcacttccgcgcttggcacaaagccaatggttaattgtctgtcttcctgaacaattttccgcgcccgtaatttggcattttccgcttgttcgaggattgccagcgcgtcctggagaaaacattctcccgccgccgtcaacgcgactttgcgcttatccctcaccagtaacggaacaccgacacagttttcaagatcgcggatctggctgcttaagctaggctgactggtatgcagtttttccgccgcacgggtaaagttcagtgcctgcgccactgcgacgaaatagcgtaaatgccgtagttccatcaccttccccttgttatcgaaaaaacgtctcagctggtagaaattaactatttcacatattagcaaccaaccagcaacatccttatggcacaaaaatagaaggtcaatacatcttatctttcaggattaaaaaatatgaccacacccagtgatttgaacatttaccaactgattgacacccaaaatggtcgggtcactccgcgtatttataccgacccggatatttaccaactggagcttgagcgtattttcggtcgttgctggctatttctcgcccacgaaagccagatcccaaaacccggtgatttctttaacacctacatgggagaagatgcggttgtcgtagtgcgtcagaaagacggcagcatcaaggcgtttctcaaccaatgccgccaccgggccatgcgtgtgagttatgcagattgcggcaacactcgcgcctttacctgcccgtatcacggctggtcttatggcattaacggcgagttgatcgatgtaccgctggaacctcgcgcctacccacaagggttgtgtaaatcccactggggactaaacgaagttccttgtgtggagagttataaagggctaatttttggcaactgggataccagcgcaccgggcctgcgtgattacctgggtgacattgcctggtatctggatggcatgctggatcgtcgcgaaggcggcaccgaaattgtcggcggcgtacaaaagtgggtgatcaactgtaactggaaattcccggcagagcagttcgccagtgaccagtatcatgctctgttcagccatgcttctgccgttcaggtattaggggcgaaagatgatggcagcgataagcgcctcggtgatggacaaaccgcccgcccggtgtgggaaaccgccaaagatgcgctgcaatttggtcaggacggtcacggtagcggtttcttctttactgaaaaaccggatgctaatgtctgggtcgatggcgcagttagtagctattaccgcgaaacctatgccgaagcagaacaacgtttaggtgaagttcgcgccctgcgcctggcgggtcataacaatattttccccacgcttagttggctaaacggcactgccacactccgcgtctggcatccgcgcggccctgatcaagttgaagtgtgggcgttctgtattactgacaaagccgcctccgatgaagttaaagccgcttttgaaaacagcgccactcgtgcttttggtcctgctggttttctcgagcaggatgacagcgagaactggtgtgaaatccagaaattgcttaaaggccaccgcgcccgcaacagcaaactgtgtctggaaatggggcttggtcaggaaaagcgccgcgacgacggcattcctggcattactaactatatctttagtgaaactgccgctcgtggaatgtaccaacgctgggccgatcttctgagtagcgaaagctggcaggaagtgctcgataaaaccgccgcttaccagcaggaggtgatgaaatgagtgcgcaagttagtctagagttacatcaccgcattagccagtttctctttcacgaagccagcttactggacgactggaaatttcgtgactggctggcgcagctcgacgaagagattcgttacaccatgcgcaccacagttaacgcgcaaacacgcgaccgccgcaaaggcgtccagccaccgacaacctggatttttaatgacaccaaagaccagctggagcggcgaatcgcccgtctggaaacgggcatggcctgggcagaagagccgccgagtcgcacccgtcacttaatcagcaactgccagataagcgaaaccgacatcccaaacgtatttgctgtgcgggtaaattatctgctttatcgggcacaaaaagagcgcgatgaaacattctatgttggaacgcgtttcgacaaagttcgccgtctggaagatgacaactggcgcttgctggaacgggatatcgtcctggatcaagcggtaatcacttcccataacctgagtgtactgttctgatgaatcgaatttatgcgtgtcccgttgcggatgtgccggagggtgaggctctccggatcgataccagccccgtcatcgccctgttcaacgttggcggcgagttttatgccattaacgatcgttgcagccatggtaatgcgagtatgagtgaagggtatctggaagatgacgccacggtggagtgcccgctacacgccgccagtttttgcctgaaaacggggaaagcgttatgcctgcccgccaccgatccgctcaccacttatccagtacacgttgaaggtggtgacattttcatcgacttaccggaggcgcagccatgagcgatctgcataacgagtccatttttattaccggcggcggaagcggattagggctggcgctggtcgagcgatttatcgaagaaggcgcgcaggttgccacgctggaactgagcgcggcaaaagtcgccagtctgcgtcagcgatttggcgaacatattctggcggtggaaggtaacgtgacctgttatgccgattatcaacgcgcggtcgatcagatcctgactcgttccggcaagctggattgttttatcggcaatgcaggcatctgggatcacaatgccagtctggttaatactcccgcagagacgctcgaaaccggcttccacgagctgtttaacgtcaatgttctcggttacctgctgggcgcaaaagcctgcgctccggcgttaatcgccagtgaaggcagcatgattttcacactgagtaatgccgcctggtatcctggcggcggtggcccgctgtacaccgccagtaaacatgccgcaaccggacttattcgccaactggcttatgaactggcaccgaaagtgcgggtgaatggcgtcggcccgtgtggtatggccagcgacctgcgcggcccacaggcgctcgggcaaagtgaaaccagcataatgcagtctctgacgccggagaaaattgccgccattttaccgctgcaatttttcccgcaaccggcggattttacggggccgtatgtgatgttgacaagccggcgcaataatcgcgcattaagcggtgtgatgatcaacgctgatgcgggtttagcgattcgcggcattcgccacgtagcggctgggctggatctttaaggaagcacgatgaaagaaaaaacgatcattattgtcggtggcgggcaagcggcggcaatggctgcggccagcctacgccagcaagggttcaccggtgagctgcatctgttttccgatgagcgacatcttccttatgaacgacctccactcagcaaatccatgttgctggaagattccccgcagttacagcaggtgttacccgctaactggtggcaggaaaacaatgttcatctgcattccggtgtaaccatcaaaacgctgggtcgcgacacacgagagttagtgttaaccaacggcgaaagctggcactgggatcagctttttatagcaaccggcgcggcagctcgaccgctgccgttgcttgatgcactgggagaacgctgctttaccctacgccatgccggtgatgccgccagactgcgagaagttctgcagcccgaacggagtgtcgtgattatcggtgccggaactattggtctggaactggctgccagcgccacgcagcgcagatgtaaggtgacagtgattgaactggcggcaaccgtcatgggccgtaatgcaccaccgcccgtgcaacgctatcttttacagcgccaccagcaggctggtgtgcgcattctgctcaataatgccattgaacatgtggtcgatggtgaaaaagtagaactgacgctgcaaagtggggaaacgcttcaggctgatgtggtgatttacggtattggtatcagcgccaacgagcaactggctcgcgaggccaaccttgatactgccaatggcattgtcattgatgaggcttgccgcacctgcgatcccgcgatctttgccggtggcgatgtggcaatcactcgtcttgataatggtgcactacaccgctgcgaaagctgggaaaacgccaataaccaggcgcaaattgccgctgccgcaatgttagggctaccgctaccgctactgccgccgccgtggttctggagcgatcagtacagtgataacttacagtttattggcgatatgcgtggcgatgactggctttgtcgtggcaacccggaaactcagaaggcgatttggtttaatctgcaaaacggcgtgcttatcggtgcggtcacgctgaatcaggggcgtgagattcgcccaattcgcaaatggatccagagcggcaaaacgtttgatgcgaaactgctgatagatgagaacatcgcgcttaaaagtctgtaaccaggataattagcgaatatctcaatgcctggggcgtggcgaggtgcaagagtgtgtattacgtttaaaagtcattatcttgcaaagggattggttatgaacacactacgttattttgattttggagctgcccgccccgttttgttattaattgcccgtatcgccgtggtcttaattttcattatttttggttttcccaaaatgatgggctttgacggtacggtccaatatatggccagcttgggcgcgccaatgccgatgctggcagcgattattgcggtagttatggaagtgcccgccgcgatattaatcgtgcttggctttttcacccgtccgctggcggtgctgtttattttctacacgctgggtacggcggtgattggtcaccattactgggatatgaccggcgatgcggttgggccaaatatgattaatttctggaagaatgtcagtatcgctggcgcgttcttgctattggcaattaccgggccgggggcaatttctctcgatcggcgttaagaaagatgccggatgcggcgtgaacgccttatccggcatttaataaattacagccactctacccgcaagctcatctcactagttgtactttcccctggtgctagcgcaatgagatcacccccttccgggcgatgatgatcatccggcgcatggctcatcggttccagacagaagaaatcaaacgcatatcctttatcaaacgcagggtcggaaacaaagatgaaataacacggtgcaggtggcgtcgtttccatgatgatggcataaccttcctgcggctgctcgatgcgggcctgaccattccatccggcaaaaccattgttcacccactggcgcggcaacggcgcgggctggttaaaatccagttcctgcggtagctgctcgcaaaactcacccgccagccactgctcccgctccagccagtaaccgctcgcctgtgcctgaatccgcgtttgcgggctcaacggaaaataaggatgccagccggtaccaaatggcagcgtctctgccccttgattggtgacagagagcgtcaccgtcagcgtatccgccgttaaatgaaacgcctgacttacccgatagtgatagacaccgctgcgatgttcatacaccagacacaaactatcatcgctgtggctgacacattgccactcgcccagccagccatcgccgtgtagatagtgcgcatcccactcaacattcggttgcagttgatactcacgcccctgccagacaaaacgattgccgctcacccggtttgcaaatggcaccagcggaaaacaactggcatcggttgccacaccgctttttttaccaggacgtaagagcggcgtcgtatcgcgccagaagccttcgattacgccgccctggtcagaaacgtccagctttaggctcccgtgggataaggtatagatggtcatccgctaactccttaatccgggaagttaatcacaactttcccgcatttgccgctcgccatcagcgcataggcatcacctgcctgttccaggctgaagcgatgggtaatggcgttacgcggccacagcttccagtccgtcagatcatgggcgcatttttccatatggaacagactggtcacccaggagccgataatccgccgttgatggtgcatcagatcggcgctgacctcgaattccacttttccggtttcaccaatgtaaaccacccgtccccagtcagcggtggattgcagtgccagcaagcgacctgcggcattaccggaacaatcgagcgcaacatccgcgccaccgtgggtgagttcggcgataatctgcggcagaccttcggtggttgctaaatagccgtgatccatcacccctaactgttttgccatcgccagacgttccggcagcatatcaacgccgatgatccgttttgcaccgcgacctttcgccagcatcatcgccatcatgccgactggccccagaccgaccaccagcacgttatcactgccggaaacttcgccgcgcaaaattccttcatacgctgtaccaacgccgcaactgataaacgcaccatcttcgtagctcagcgcatccggcaggaggatcagatctttttcttccgccagcaagtattcggcatgaccgccgtcacgctgccagccgtaagccgcttttccttcgccagtacaagaaataggaaaaccgcgacggcagttcgggcaaaaaccacagccagaaatgtgatacaccagcacgcggtcgccctctttaaaatggcggcagccttgccccatcgccacaatctgcccgcacggttcatgaccgttgataaagccctggtataacggtttatcgggtgccgccgctgtggcacggtgttgatgatagatatagtggacatcgcttccgcaaatcccggaggatttcattttgatcagtacctggttaatccccggcgtcggcaccgcaacttcccgcagatcgacggtgctatttcctggtaaataagctgccagcatcgttttcataaatccctcattaacaatacgattaattttcatccctgccgcacccgcgccaggggcgttaaggtttagcgtttcgctttactgcttcgctgggtcagcaagatattcgccagcaccgccaccacgatgatgacgccgcgtaccacctgctggaaaaaggagttaataccgagcagcaccagaccgttaccgattagcgtaatcaccagcacaccaagcaatgtaccgaacagggaaccgcgaccgccggaaagtgccgtaccgccgaccacgaccgcggcgatgacgtcaaactccagaccgtttgcggcacctgcgttaccagaaccgaggcgcgccgccaacaaaatgccggtcaccgccgctaataatccgctaagggtaaagataagaatgcgcacccgacgaacgttgatgccgcacaactgcgccgccgtagcattaccgccaacggcaaaaacgctgcgcccgaaggcggttttgcggctgatgaacacaaacagcgcaaacaacacaatcatgatcagcgcggataccggcacaccgagaaattgtccgcccagccagtccagcacctcgttttcatcaatcggcactggcagtgcgttcgtcataaacagccccattccgcgcagggcgctccacagccccagtgtggcaacgaaacttggtacattaaacacgccgcgcagcaccccggccagcgttcccatcagcgcgcctaacagcaacaccagcaggcacgccaccgccagcggaacttcaaattgcagcaaaaatgccaggcacacgctgacaaaagccaccatcggcccaacgctgacatcaatttcaccggagataataatcagcgtcatcgcccaggcggcaatcccaatggtggcggcatcgcgcagcacgttcatctggttattcaaactgataaagccaggcgcgttcagggagaagaccagataaagaatggcaatcaccaccagcaaaccgatctcattaatatggcgactgacaaattgtttgaggctgacgctcttgccctgcggcaatggtaaactgctagcagacatcttcaggttcctcggtaaaattcatcagtgcacagacagaatggcggacatcagctcatccacattgaccggagcgtgaaactcctggctgaacgtgccgtgctgtaataacaggatgcggtcacacaccagcggcaactcctccacttcactggagataaacaccacgctttttccttcggcagccagctcacggacaatacggtaaatctgctgtttggcttcgatatcgacgccgcgcgttggctcgtcgagcaacaaaatctggctggcagcatagacccaacgaccgatcaccactttttgctgattgccaccagaaagcgtgccgatgggtgtttcgctactggcggccttgaccgtcatccgctgcatcacctcttcggtcaggcggcggatggtggaccattgcagcacaccgttggcgctgattttttgccgattggtcagcactgtattttcgtcaacgcccaaccagggaatgatccccgcttctttgcggttttctggcgtatagccaatgccgcgtttcagcatgtcgccgtaatcggggcgcgtgattttctcgccgttgataacaatttcgccctgttcatactcctccagcccaacaatcgccttcagcaattcactgcgccctgcccccagcagaccagcaatgccgagcacttcgccacgacgtagcgtaaaactgatatcctccagcttgggcttatggcgtaacgcacggacttccagcacggcctgatccacaatttcctgaggggctaccggcgcaatatcaacgtgatcgcgcccgagcatcaggctcacaatatgatgcgtggaggtgttttcgagcatcacatcgcccgccacctgaccatcgcgcataacggtggcacaggaggcaatgcggcgaatttcttccatccggtggctgacataaatcaccgccacgcccagtgcgctcatctttttcaccgcgctgatcaccagttcaacttccgcactcgcaaggctactggtaggttcatcaagaatgaccacgcgcggctcgcccttcatcacccgcgcaatttccaccagctgcttttgcgccgggcttagcgtactaacaagttgttcaggactaacgtcaacgcccagcgcctgtaagcaacgttgggcatcctgcgccatttgcaggtaatcaatcatgccgttgcggcggggccactgaccgaggcagaggttttccgccactgtcagcccttccaccagacttaactcctgataaaccgcgcgcacccccagttcagcggcacggcgagtcagcgtagcttcgtcaccttccagtcgcgtctcgccaatccagatatcaccgctatccgggcgttcgctgccggtaagcattcgaatgagagtgcttttgcccgcgccgtttttacctaacagcgcacgaacttcgcctttattgagcgtgaagttaacgttatccagcgcaacgacgccgggataacgcttatttcctgccaccacttttgctaccgggactgcctctgttgccgtgaacatagggacctctgcgaatcagcgattagggcagaccatcaacgtgcgttgccagccactgtttaccgtcttccgttttggtatagagatcgataggcacctgaatcactttttcaccgtcggcttgtttattgataaccttcaatgtttgcgcgaaaacagcattgcccattttcttaccggaaatatccactaccgctttcagcacctgattgttttccagctcctgagcaatttcggttgtcatatcgctaccgaaaacagcaatttttccggcctgattttgattacgtaccgcttttaccgcgccgagtgtcgcaccgccgctttcccccataatggcgttgagatccggcgtggagataattagtttttcaccaacggaaatcgctttatctaaaacagtcccttcctgattagcgacaatttgcgcgccgggaacgcgggattttaaaacttcttcaaatcctttacgtcgctgcacacaaacttcaaaggcttcgcaattgatgacggcaattttcggctggtcaattttattggcaataaaataatcagcggcagcgttacccagttttttaccaaattccagcggatcgccgaccagatacgcgctgacatatttatcgacccccttttgattaatacaggtgttgtagcaaatcaccggaatgcccgcttcactggcgcgacgaacggtacggctactgccattttcagacactgcgcttaaaataatggcatcgacattacgcgccacgagggtatcaacaaaggtactttctttgctaatatcaccctgggcgttagtttctattaactgaacttgtacactggaatcttttgccgcatcctgaacgccctgacgcactccagcgtagtatccctgagtatcaaggtatattgcgccaatggtcatttctttttccgcagccctggcaaatagtgcgctacctaatagcgtagccattaataatagattacgggttgttctcatttttgtaggcatagagcctcctgtagggtttttattaacaacggcttattctaattattttgtgatgagcggcagcgcgtgccgctcaaatattacagttaatagggtttagtgaacgcggttaaaaataaaaggcatcacggtggtgaataatgccgctttcggccaagccggattaatcgccgtcaattcagcgcgagcagactcatattgcgcaacctccccgagtcccgcggacgccagcatcgccaccatcaggcatttttctttatgctgctgttgtaaatcgccatacaggctcaacaagtcaggttggctgacggcaaagaaatccgcttcgatactggttttcgccatctcttgcgcccactgtttcatttcactaaacagttgctgtgcggtttgttgttcgcccagcagtcgcagcgccatcccttgccagaagagataatcaaccggctgatcgttgtaataactgtgaatgttaatagtgcgatcgccggtcgccgccagacgtaaacaacgcgtcgcttcagtttcatcgccctgcgcgttggcgcatatcgcctgccagaaccagatgtcgttatcagtttgccccggtaaacggccttcgcttaaattctccggataatgcagcgcggcatgaagcagttcgcaggcctgctgcggctgtctggcatcaagatgctgccaggcgcgtaataactggttgaggataaactgactggtgaccttcccttccccgccttcccacgggtggaatttgcgcgtggcgagaatgtccgccgctttgtctgcctgacccgtgagatgccacaaattgagcagttctgcggtcatgtcgtcgcgtttcagcgcaatttccagattattttccagacgcgccagtcgtttctccggtgtggctccacttaacttatccagcaaatcccgttcgaaaagcagacgtgcatcctgcggcgcaagctgataagcattatcaagataacgcgcggccagctcataatcgtgttgcttattccacgcatggatcgctaacccgcgccagccgtcggcaaactccgggctcatctctacgcaacgttgccaaaaggcaatggctttgttgtagctacgtttgttgtagtagaagcaagctagtaaatggcgagcaaaccagcactcttcaatactctccagcgccgccacttcttccagcgtattcgggaaacggacaaactgcgggaagacatcaatggcttttgcgaccagttcgccacgttcggctttcggcagcaagctggcttgcaggtaaagcggcagcgtgcgctggcagtccagtgcgttcagcatctctgccgccagggtgggcattccccagttaatcagttgcccggcggtcatcagggcgttaacgtcgcgtccctgacacagaccgcgccactgcgcgagagcactttcgctacgaccatcgaaccagttcagccaccacagagtggcgttcagcggataatcgcgcagcagtttctcgcgctgcacacgcgcgttgtcctgacgaccacttaacaccagcagcagattatgcaggcaaagcacttcctgattggttgggcaggcgcgaagactttgttggcaaaaatccagaccagcgtcgaagttaccattacgcgccgccagtcgtgccaggccataatagccaccggctttgctgttgccgctccagaccgcacgccagaaatcctcttcggcttgttgatattgtccctgacgttcgtaagcactggcgcgaatcaaactcgcctgtccgcactgcggatttttgttcagcgcatgtgcgcgtttcagagcctgagtggcatacgccaccgcttgcgggaaatctgcgcggttatattccagcatcgccagcgccaggttacagcgataatccagcgggtccagcgccacgccgcgcaggtagtaatcgaacggactacggctggcgtgatgatattgctccagatgctgaccgataaaccaggcttcatctgtactggtaatgtcttgtgctgccagtggcgctttggcgacgtccggtaacggcaacgcttgcggctgatgttcctgataactcagtacaatattgccgtcggcatcggagagctcaatggtcagcctttcaggattgataccgtgcaacacgccctggatggcggtcgcaggcatcagtgccacggcatcatcaagtaacgcgttgcatttaccgatttcgcggatcgccaggcggtatccgttcaacggagagatggcatacagcccccactcaatcccccgcttactacgctggagttttatcaccgcatcgcgggaggcattttgcaccatgcccaaagaatgataaggcaggaaatactgctcaaaacgcttctcttcgtaagcatcaagccaggtaaaatcgggctggttatcggcaaaaataccggtcatcagttcgatatacgggccgttattgtcggtcagactcttatcccacgcctggccaaattcactgtgtccccaactccactgttttttacctggcgcaatatggtggttggcaacgtgcagcaaaccgccatcttcatcgtgacaccacgcgccgacaaaatcgtactggcttttttcggccatataactggttggaacaggcacatttttatagcgagaaatgtccactccagcggagtagtccactttgtagtaagtgccggtagcgatggggaaagcggagacggcccgtttgccgtgatcaaacaccgccgttacatccggcgggaagacgctctgatgcccttccccccctttcactgccgggttggcccaccacaagaaatgacgcggcgtggcgttcccgttatagacgcggctggcgatttccagcgccgcccggtcagggcgcagggtgaaacctgtcatcacctgtaaaccatgcatcggctccgtttcgcctacccacaccgtctgtgcaccgtcttcatgggcttcgagggtgaaatcaacgggcataaaggtggtcgggcgatgatgttgcggccagttaaactcaatcccaccggaaatccacggccccagcagccccaccagcgcaggtttaatgacttcattgtgataaacaaaatcgcgctgtttcactttatcccacgcgcgatgcacccgaccgcccagttccggcaggatcatcactttgatgtagtcgttttccagccacaccgcctgccaggatttcagggttttctgctcgctcagcgtatcggtcacgccgtagggataaaccgcgccggagcttccctgataaacgcgattttccaggaacatgggatgtatatcctgcggcccggtttcataggtcgggatctcaacgcgctcttgccacacttttactggagtcatggtgccctcaatattaacaagacatactgaattaaaagatttgtggcagtgtattgaacaatctggcaatgttttcgcggaataatcacgcaattaactaaacaaggtttagtgaagatgagagcctgcattaataatcaacagattcgccaccataacaaatgcgtgattctggaactgctgtaccggcaaaagcgcgccaataaaagtacgctggcccggctggcgcaaattagcattccggcagtcagtaatattttgcaggaactggaaagcgaaaaacgggtggtgaatattgacgatgaaagccagacgcgcgggcatagtagcggtacatggctgattgcgccggaaggtgactggacgctgtgcctgaacgtgacgcccaccagtattgagtgtcaggttgctaatgcttgtttaagtccgaaaggtgaatttgagtatttacagattgatgcaccgacgccgcaggcgctgctgtccgaaatcgaaaaatgctggcatcgccaccgtaaattgtggccggaccataccatcaacctggcgttggcaatccacggtcaggttgatcctgtgaccggcgtgagccaaaccatgccgcaagcgccgtggacaacgccggtggaggtgaaatatctgctggaagagaagctcggcattcgggtgatggtcgataatgactgcgtgatgctggcgctggcggagaaatggcaaaataatagccaggaacgggatttctgcgtgatcaacgttgattacggcattggcagcagcttcgtgattaacgagcaaatttatcgcggcagtttgtatggtagcggacagattggtcacaccatcgttaatccggatggcgtcgtctgcgactgtggacgttatggctgcctggaaactgtcgccagcttaagcgcattaaaaaaacaggcgcgggtatggctaaaaagtcaaccggttagtactcaacttgatcctgaaaaactgactacagcgcagttaatcgctgcctggcaaagtggagaaccgtggatcaccagctgggttgatcgctctgccaatgccattggtttgagtctgtataacttcctcaacatcctcaatattaatcagatttggttgtacggtcgcagttgtgcctttggtgagaactggcttaatactattattcgccagacaggatttaacccgttcgaccgcgacgaaggaccgagcgtgaaagcgacgcaaattggctttgggcaattaagccgcgcacaacaggtgctgggaattggctatttgtatgttgaggcgcagttacgacagatttgatggcgcgataacgtagaaaggcttcccgaaggaagccttgatgatcataaacgaaaaattgcctgatgcgctacgcttatcaggcctacacggagattgcaatatattgaatttgcaaagttttgtaggccggataaggcgttcacgccgcatccggcatgaacaacgagcacattgacagcaaatcaccgtttcgcttatgcgtaaaccgggtaacgtgcgcagatgtcgagaactttacctttgatgcgctcgataacggcttcatcattgatgctgtccagcacgtcacacatccagccagccagttctttcgcttcggcttctttaaagccgcgacgggtaatcgccggagtacctacacgaataccggaggtcacaaacgggctcttcggatcgttcggtacgctgtttttgttgacggtgatgttagcacggcccagagcggcgtctgcttctttaccggtcaggtttttatcaaccagatcaaccaggaacaggtggttatcagtgccgccggaaaccactttgtagccgcgctcgaggaacacttctaccatcgctttagcgtttttagcgacctgctgctggtaagttttgaactcaggctccatcgcttctttcagagcaaccgctttaccggcgattacgtgcatcaacggaccgccctgaccaccagggaaaacggcagagttcagttttttgtacagctcttcgctaccacctttcgccaggatcaggccgccgcgcggacccgccagggttttgtgagtggtggtagtaacaacgtgagcatgaggaaccgggttcgggtagacgccagcagcaaccaggcccgcaacgtgcgccatatcaacgaacaggtaagcaccgatgctgtcagcgatttcacgcattttcgcccagtccaccacgccggaatatgcagagaaaccaccgataatcattttcggcttgtgttctttggcttgtttttccagatcggcgtagtcgatatgaccggtagcatcgataccgtaaggaacgatgttgtacagtttaccggagaagttaaccggagaaccgtgagtcaggtgaccgccatgcgccaggttcatacccagaacggtatcacctggttccagcagcgcggtgtagaccgcaaagttagcctgggagccggagtgcggctggacgttagcgtagtcagcgccgaacagttctttcgcacgatcgatcgccagttgttcaacgatatcaacatactcgcaaccgccgtagtagcgtttgcccggataaccttcagcatatttgttggtcagctgagaaccctgcgcctgcattacgcgcgggctggtgtagttttcggaggcgatcagttcgatgtgctcttcctgacgtactttttcctgctccatagcctgccacagttcggcatcataatcggcaatgttcatttcacgctttaacatccgcatctcctgactcagctaacaataaaatttttggcctttataggcggtcctgttggacaacggcgaacagtataaccgaatcattgtgcgataacaggtcttgacaaaggaatttacgcaaacgattaccttcaggctacgcaaggctttggagaataaagagcttgcaaccggaaacggatttcttttcaggtttgtgatgcaaatttttcacttcatcacattctttctgaaaaacaccaaagaaccatttacattgcagggctattttttataagatgcatttgagatacatcaattaagatgcaaaaaaaggaagaccatatgcttgacgctcaaaccatcgctacagtaaaagccaccatccctttactggtggaaacggggccaaagttaaccgcccatttctacgaccgtatgtttactcataacccagaactcaaagaaatttttaacatgagtaaccagcgtaatggcgatcaacgtgaagccctgtttaacgctattgccgcctacgccagtaatattgaaaacctgcctgcgctgctgccagcggtagaaaaaatcgcgcagaagcacaccagcttccagatcaaaccggaacagtacaacatcgtcggtgaacacctgttggcaacgctggacgaaatgttcagcccggggcaggaagtgctggacgcgtggggtaaagcctatggtgtactggctaatgtatttatcaatcgcgaggcggaaatctataacgaaaacgccagcaaagccggtggttgggaaggtactcgcgatttccgcattgtggctaaaacaccgcgcagcgcgcttatcaccagcttcgaactggagccggtcgacggtggcgcagtggcagaataccgtccggggcaatatctcggcgtctggctgaagccggaaggtttcccacatcaggaaattcgtcagtactctttgactcgcaaaccggatggcaaaggctatcgtattgcggtgaaacgcgaagagggtgggcaggtatccaactggttgcacaatcacgccaatgttggcgatgtcgtgaaactggtcgctccggcaggtgatttctttatggctgtcgcagatgacacaccagtgacgttaatctctgccggtgttggtcaaacgccaatgctggcaatgctcgacacgctggcaaaagcaggccacacagcacaagtgaactggttccatgcggcagaaaatggcgatgttcacgcctttgccgatgaagttaaggaactggggcagagtctgccgcgctttaccgcgcacacctggtatcgtcagccgagcgaagccgatcgcgctaaaggtcagtttgatagcgaaggtctgatggatttgagcaaactggaaggtgcgttcagcgatccgacaatgcagttctatctctgcggcccggttggcttcatgcagtttaccgcgaaacagttagtggatctgggcgtgaagcaggaaaacattcattacgaatgctttggcccgcataaggtgctgtaatttgatgttgccggatggaaacatccggcaacccttgacgcggtttaaattgccgcgtcgtcctcttcaccggtacggatgcgaatgacccgtgccacgtcaaagacgaagattttaccgtcaccgattttgccggtttgcgccgtgcgaataatggtatcgacacaggtatcgacaatgtcgtccggtacgacaatctcaattttcactttcggcagaaaatccaccatatactccgcgccgcggtacagctcggtatggcctttctggcgaccaaagcctttcacttcggtcaccgtcatgccggtaataccgacttcggccagtgcttcgcggacatcgtccagcttgaagggttttataatcgcatcaatctttttcatgctattccttgaaaaggtcgcctgtcttttgatctgctaaacgtaacacataacgccaattcattccttgaaatcgtttgcatccagctcgtgtcgggaaagcagtttataaaattctgtccggttgcgccccgccattctcgccgcgtgggtgacgttgcctttggtgatttgcagcagcttacgcaaatagttgagttcaaactgattacgtgcctcaacaaaggttggcagcgccgtattttcaccctccagcgcctgctccaccagcgcatcactaatcaccggagaactggtcagcgccacgcactgttcaatcacgttgaccaactggcgcacattacccggccagctcgcggtcatcaggcgtttcatcgcatcggtagagaacgcgcggacaaacggtttatgtcgctctgccgcctggcgcaacaggtgatttgccagtagcggaatgtcttctgtgcgctccgccagtgccggaattttcaggctgacaacgttgaggcggtaatagagatcttcgcggaattccccgcgcgccatcgcttttggcagatcacggtgagtggcagaaataatccgcacattgatatcaatatcgcggttactgcccagcgggcgcactttacgctcctgcaacacgcgcagcagtttgacctgtaacggcgcaggcatatcgccaatttcatcgagaaatagcgttccgccttccgccgcctggaataaaccttcgcgattgctgacagcgccagtaaacgcgccacgcgcatgaccaaacagctcgctctccagcaattgctcgggcaatgcgccacagttaatagcaataaatggtttgctgttgcgcgggctggcgttgtggatagcctgggcgaaaatctctttcccggtgccgctctgaccgttaatcaaaacgctgacgtcactttgcgccaccagccgcgcctgttccagcaaacgcagcatcagcgggctgcgggtgacaattgcctcgcgccagcgttcatcggtggctggcgcggattgctccagcgcatcgtcaattgcctgatatagcgcgtctttgtcgacaggcttggtgaggaaactaaaaacgccctgctgtgttgcagcaacggcatcgggaatagaaccatgcgcggtaagaataattaccggcattcccggctgcactttctggatttcagcaaacagctgcataccgtccatttcatccatccgcaggtcgctgatgactaaatctactttttcgcgattcagtacccgtaatccttcagcgccactttccgccgtgaccacactgtagccttcgctggtcaggcgcaggccaagcagtttcagcaatcccggatcgtcatcgaccaataataaatgcgcaggtttatggctcatcaggagtgacctcatgggtggatggcgcgggcttttcactctcgtgcggcgtatccgggctgaaatttccagccggtttgcgggtgctgagctggcgttcaatatcggtcaggttttccagcttgcgggtggtgagttccagttgctgctgtagaacgtgatgttgctggcgcaatgtatccagctcgctgtcgctggactgctggagtttactgtaacgttggcgctcttccgccagttgcagttgcagcgcctgaccatcgcgccagagttgatacagtgggcgaacctgtgccgggatctcggtacttaacgcttcaatacgcgcgaccagctggcggcgctcatacggcgtaattttggcgtcggcgagcaaaatcccttgtttaaaggtattttgccagctgccgtcgtcatattggcgagcttgctgacggctctgcgcaggcattaaacgatcagcacaatccatcgcccgcagccagtaaagcggattggtttcggtacttttaccttgcagcgcccagatgtcgctacattcagtagaaagatagtcagccagttgataaaccggaattttttcttctgctggcgtatcaatggctggcttattgtgattctgcacgcaacccagcaatgccagacatggcagccctgccagccacagccgtcggggcaataatcgttgaaaaatgtgtcgcatattcaccagacttaaagcctatcccagtgggcgtaattgttgcagacagtctggacatggacagcgcggagaaaccggagcgtacatatcgtacgtgaagatttcgagcactgcccggggccgaactgacaaataaaatagcctgataggataggctgttagcattatttcgtgtttttgctgctcggtaattcaatgcggaaacaaacgtcttgcccgctctcgtcgaccagatacagttccccttgcatacggcgaatacaatccctggcaatgcttaatcccagaccgctgcccttcaccgccccttttcgctggtggcttccctgaaaaaagggttcgaagatcatggcgcgttcctcttgcggaatgggcgtgcctgtattgatgacatcaatataaacccgcgcaccatgtaaactgctgcgaaggcaaatgttaccggattcagccccgtagtgcaccgcattggagtaaagattatccagtacgctcatcagcagcattggctccgccaggcaagctgttgctttgagatcgacgtcggtatgcatcattttagcccgtgcgggcaggctatgagcagaaaccactgtctccaccagcggtgctaactcaacattctccagttccaccgcactgtccgcctgtttacggttgtaatcaagcagttgttcgatcagtttttgcaaattgcggctgctgctatcaagaatgctcaccacctctttttgctctggcgtaagcggcccgacaacctggtcagccagtaattcagtgccctcgcgcatactcgccagtggcgtttttaattcatgagataaatgtcttaaaaattgatggcgttgggattccagccaactcaggcgctcacttaaccaaagaatacgttgcccaacgctgcgtaactcgctcggtccactgaagctgacgctattgcccagagaacgcccttcccccagacggttgatcatgcgctcgatatttttcaccggcccgataatcatccgcgtgaaaagcagtaccattaccagactcaccagaaatagcaccaggctttgccaaccaaaatattgcccacgttcggcgatttcacgctgaagctgctgcccacgagagaacaccactgtgcgcgtggcctgtaccatttcggtattggcactggcaaaggcttcaagacgtgcggcggcggcagcatcgggaccgctgttgttacactgaagttgagccagattgtgcaaatcctgacgtaatgcctggtagagtttatcgtccggcagcacgcctgcgtgggcatcgagcatttcgctgtaacgcttgcgctggctttgataaaccttcgccagggttgggtcgtccagcacgcaatactgacggtaactacgctccatctccagcgccgcgttggtcatcgcttcactgcgccgggcatcaataagcgtagtgcggttaaccagcgccgcctgatcgctaagcgcattcaggctttgccaggcttgccatgccagcaccaacaggggcagcagaatcagcaaaaatgccagcattaccagttgtcgtaaactgcggggaaaaacgggccagcgtttcaaggtgttactctcgtcagacgcgaatagcctgatgctaaccgaggggaagttcagatacaacaaagccgggaattacccggctttgttatggaataaggcggtgcctaactcgacgtttcgcccgatggttgatatagctacgctgatatcagaagttggacggcaggcaccttgttgtgcgtcattcgtattttatgtagcacgtcccgaaggggctgacataagtcggtgaatgagccactggttactattatgcagtaactgtgccaataaagaaaatagtttggtaacgtactgattatacgttgctttgaggggtttatgtctcctccgctgtttgaatgtaaatcagccactgtgtcgctaaaaagagacaacttaagataaacttattagataatattaaaatcaatgagttaagtgtcgccagaaagcgacacggcaaaccacccattgtcgtgatttacagacacaaaaaagctcccggagttgggagcttatgatagtggttggtgcttaatgccgcatccgggctgcaaaaccaatgggctgacgacttaccccaactgcttacgcgcattgcggaaaatgcgcatccatgggccatcctcgccccagttttccggatgccaggagttgctgacagtacggaaaacacgttccgggtgcggcatcataatggtgactcgaccactttcagtcgtgactgccgtaataccgttcggactaccgttcgggttagccgggtaggtttcagtgactttgccgaagttatcgacatagcgcagtgccaccagccctttgctttccagtgccgccagatgcgccgcatcacgcacttccacgcgcccttcaccatgagagacagcaatcggcatttggctgcccaccatcccctgcaacagcagagacgggctttgggttacttcaaccaggctgaaacgcgcttcaaagcgatcggaggtattgcgcacaaaacgtggccacaactcactacctgggatcagttcacgcagattagacatcatctggcaaccgttacatacccccagcgccagcgtttgcggacggtggaagaaggttgcaaactcatcgcgtacacggtcattgaacaggatactcttcgcccaaccttcaccggcacccagcacatcaccgtaggagaaaccaccgcacgcgaccagggcgtggaaatcttccaggcccgtgcgtccggtcagcaggtcactcatatgcacgtcgatagcatcaaagcctgcacggtggaaagctgccgccatttcaacatggctgttcacgccctgctcacgcagtacggcaactttcggacgtgcgccagtggcaatatacggtgctgccacatcttcgttgatatcgaagctcagttttacattcaggcccggatcggcgtcgttagatttcgcctgatgctcctgatcggcacactccgggttgtcacgcaggcgctgcatctgccaggtagtttctgcccaccagacacgcaacgtggtgcggctttcgctgaatacagtctgcccgttggcggtaatcacaaaacggtcaccggaaaccgcctgccctacataatggacacaatcagcaagcccatgctgtgccagtacggactcgaccgcttcacggtcagcggcacgaacctgaatcaccgcacccagttcttcgttaaacaacgccgccaggcgatcgtcacccagagtggcgatatccgcgtcaatgccacaatgaccagcaaaggccatttccgccagcgttaccagcaggccgccatcagagcggtcgtgatacgccagcagcttacgctgtgcaaccagcgcctgaatcgcgtcatagaagcctttcagttgcgcgacatcgcgtacatctgccggtttgtcgccaagctgacgataaacctgcgccagcgccgttgcgcccagcgcgttattgcctttgcccaaatcaatcagcagcagtgcgttatcttcggtagaaagctgcggcgtgatggtgtgacgtacatcttccacgcgggcaaatgcagaaatcaccaggctcagcgggctcgtcatttcgcgctcttcgttaccttcctgccagcgggttttcatgctcatggagtctttacccaccgggatcgtcaggcccagcgccggacaaagctcttcgcccacggctttaacggcttcatacaggcccgcatcttcaccagggtggcctgccgccgccatccagttggcggaaagtttgatgcgtttgatatcgccaatttgtgttgcggcgatgttggttaacgcttcaccgaccgccagacgggcagaggcggcgaaatccagcagcgcaaccggcgcacgctcgccaatcgccatcgcttcaccgtagtagctgtcgaggctggcggtagtgaccgcgcagttagcgaccggcacctgccacggccccaccatctgatcgcgcgctaccatgccggttacgctgcggtcgccaatggtcaccaggaaggttttttccgccacagtcggcagatgcagcacacgtttcaccgcgtctgcaatggtgatcccttcacgggccagcgcgtcgcctttcgctttcagcgtttgtacatcgcgggtcatcttcggcgttttaccaagcaggacgtccagcggcagatcgatcggctgattatcaaaatgacgatcgtgcagagaaagatgcagttcttcggtcgcttcaccaatcaccgcgtagggtgcgcgctcacgcttacacagttcgtcaaacagcggtaattgatcggcagcaaccgccagcacgtagcgttcctgggattcgttacaccagatttccagcgggctcatgcccggttcgtcgcttagaatctcgcgcagttcaaatttaccgccgcgcccgccgtcgctcaccagttccggcatggcgttagaaagaccgccagcgccaacgtcgtggataaacaggattgggttggcatcaccaagctgccagcaacggtcgatcacttcctggcagcgacgctccatctccgggttgtcgcgctgtacggaagcaaagtcgaggtcggcatcagactgaccagacgccatagaagacgctgcaccaccgccaagaccgatgttcattgccgggccgccgagaacgaccagcttcgcaccgacgttgatctcgcctttttgtacgtgatcggcgcgaatgttgccgatcccgcccgccagcatgatcggtttgtgataaccgcgcagctcttcgccgttgtggctgttcactttttcttcataagtacggaagtagccgttcagtgccggacgaccaaattcgttgttaaacgccgcgccgcccagcgggccttcggtcatgatgtccagcgcggtgacaatgcgctcaggcttaccgaaatcttcttcccacggctgttcgaagccaggaattcgcaggttggaaacggagaaaccaaccagacccgctttcggctttgcgccgcgcccggtggcaccttcatcgcggatttcaccgccggaaccggtcgccgcgcccggccacggagaaatcgccgtcgggtggttgtgagtttcgactttcatcagaatatgcgccggttcctgatggaaatcgtagcggcccgtttcgtggtcagcaaagtagcggcccacttcagaaccttccattacggcggcgttatctttataagcagagagaacgtgatctggcgtggtttcgaaagtatttttgatcatcttgaacaggcttttcggctgctgttcaccatcgataacccagtcggcgttaaaaattttgtggcggcagtgctcggagttcgcctgggcaaacatatacagttcgatgtcgttcgggttacgaccaagctttgtgaaagcatcctgcagatagtcaatttcatcttccgccagagccaagccaagacgcaggttagcgtcgatcagcgcctgacggccctgccccagcaaatcaacgctggtaaccggagtcggttgatggtgggcaaacaactgctctgcatcatctaaagcaaaaaagaccgtttccatcatgcggtcgtgcagttcagcggtaacctgctgccattgttcattggtcagcgtaccggcttctatatagtaagcaacgccgcgctcaaggcggtttacctgttgtagcccgcagttatgggcaatatcggtcgctttgctagaccagggagagatggtgccaggacgcggggtcaccagcaggagtttgccttgcggggcgtggctggcgagtgccgggccatatttcagcaggcgttcaagttgtgcgtgctcatcatcgtttaacggcgcattgaggtcagcaaaatggacatactcggcgtaaatattgtgaaccgggagcctggcagcctgaaaacgtgccagcagtttgttgattcggaatgcgctcagtgcagggctaccacgcagaatttccatcataagtctctcgtcttctaagctttcggtgtacccaagggggggaaacgggcgtcattataaagaatctgatgcgctgacgaaaccgtttgcgtggaaataaaatcaccatcgtgaattagcaacgcgtgccgccaatggctgtaataagttgccatctggcgcaggtttacgcaaaatgccgctcatttatgagtaaacctttcactattattacgttttttcaagctgggacgcgcacgacacagagaattaactaattgaaaaaattaaagattaattatctgttcatcggcattctggcactgctgctcgcggtcgctctctggccatccattccctggtttggtaaagccgacaaccgtatcgccgccattcaagcgcggggagagttgcgtgtgagcaccattcatactcccctgacttataacgaaatcaacgggaaaccttttggcctggattacgaactggcgaaacagtttgccgattacctcggcgtaaaactgaaagtgaccgtgcggcagaatatcagccagctgtttgacgaccttgataatggtaacgccgacctgctggcggcaggacttgtctataacagtgagcgggtaaaaaattatcagcctggccctacctattattccgtgagtcaacaactggtttataaagtgggtcagtatcgcccacgtacgctgggcaacctgacggcggagcaactcaccgttgcaccgggtcatgtggtggttaacgatctccagaccctgaaagaaacaaaattcccggaattaagctggaaggtagacgacaaaaaaggctctgcggaattaatggaagatgtcatcgaaggaaaactcgattacaccattgctgattctgtcgccatcagcctgtttcagcgcgttcacccggagctcgccgtagcgctcgatatcaccgatgaacaaccggtgacttggtttagcccgttagatggcgataataccctttccgccgccctgctcgacttcttcaacgaaatgaatgaagacggtacgctggcacgcattgaagagaaatacctggggcatggcgatgattttgattacgtcgatacgcgcacatttttacgcgccgtcgatgcggtactgccgcagttaaagcccctgtttgagaaatacgccgaagaaattgactggcgtttgctggccgctattgcttatcaggaaagccactgggatgcacaggccactagtccgacgggtgtgcgcggcatgatgatgttaaccaaaaataccgcgcaaagcctcggcattacggatcgtaccgatgccgaacagagcatcagcggtggcgtgcgttatttgcaggatatgatgagtaaagtgccggaaagtgtgccggagaacgagcggatctggtttgccctcgctgcgtacaatatgggctatgcgcatatgctggatgcccgcgccctgacggcaaaaaccaaagggaatcctgacagttgggctgacgtaaaacagcgtctgcctttacttagccagaaaccctattacagcaagctgacttacggctacgctcgtggacatgaagcctacgcttatgtcgaaaatattcgtaagtatcagattagcctggtgggttatctgcaagagaaagagaagcaggctacagaagcggcgatgcaactggcgcaggattatccggcggtaagccctacggagttgggcaaagagaaatttccttttctcagctttctttcccagagcagtagtaactatttgacccattctccctctctgctgttttccaggaaagggagtgaagagaaacaaaattaatccgtgctggattgcgcttttttctgcgctttaatttcctggcggcgcatgcgaaagaagtcactgagcaacgccgcgcactcatccgccagtattccttccgtaatttccactcggtgattcatacccggatgatgcagcacatccattaaagatcccgcagcgccagttttcgcgtcacgcgcaccaaagaccacgcgaccaatgcgactgtggatcatcgctccggcacacattacacatggttcaagcgtgacatacaacgtggcgtcgatcagacgataattttgcatcaccagaccaccctgccgcagggccatgatttctgcatgtgcggtgggatcatggcgaccaatcgggcggttccagccttcgccgattacccgattgttatgcactaataccgcgccgaccggcacttcccgctcatcccaggcacgtttcgccagcgtcagcgcgtgacgcatccagtattcgtggctaaattcgacttcagacaaaaagaaaactccggttataaaagcgcggcgcattatacacggacgctatgctttactttattccagttgctggagttcaccgcgcggggttactcgccaacgatgctgacagaaataaagcagcggattgtcctgattactgtcgctatagccactgtacagccgcagcggagtgccgattttgcgctccagttgtgcgaccttttcatgtcccagacaacgcatcgtcaatacccaaccaccatagccacgctgaatttggctggcgataagattaacccgcggcagccagggcgtatcgaaataaaccgcttcaaccagcggctgcggagagccggtaatcaaccagatatcagcatcggaacttaacaggtaggtggttaatcgctcctgaaccagcggaaaggcggtaacattgtcgcgaaaccagcgcacgaaatcggcctgcaacgtctgtaaacgtgcttcgctgtgaccaaaagtgcacccccacagaagcagactcatcggccagcgtgccgcacgaccttttatcaataacgcaatggctataatcggtaacaacggcaggacaagtaacgcattcagcggttggcgacgtagtaaatagcgcagaaaactgccgaacatatcctgctgatgcaatgttccatctaagtcaaaaaacaccacacgacgctcgtgagttgccaaaccatattcctctggactgaaacatcctgattaattttcgctactacatagcctaacagatagatcatcacttttccggcaacaatcgaccgcatcatggctaactggaatttttaattcatggcaattagcggcaatggaatataaaattcactcgcgtgtgtctcatattgcctgttgtcgccactatttcatcgcgaggaaagatatgaacggcttacttcgtatccgtcagcgttaccaggggcttgcccagagtgataaaaaactggcggattatctgctgctacaacctgatacggcgcgccatttaagctctcagcaactggccaacgaagccggagtcagtcagtccagcgtcgtgaagttcgcgcaaaaactcggctataaaggttttccggcgcttaagttggcgttgagtgaagcgctggcaagccagccggaaagtccctccgtgcccattcataaccaaatccgcggtgatgatccgttacggctggtcggcgaaaaactgattaaagaaaatactgccgctatgtacgcaacgctaaacgttaatagtgaagagaaactgcatgaatgcgtaacaatgttgcgctctgcgcggcggataattctgaccggtattggcgctagcggtctggtggcgcaaaactttgcctggaagctgatgaagattggcttcaatgctgccgcagtgcgcgatatgcatgcgctactcgcaacagtacaggcgagctcccctgacgatctgttattagccatttcctacaccggtgtacgacgcgagttaaacctggcggcagatgagatgctgcgagtgggcggaaaagtgctggcgattaccggctttactccgaatgccctgcaacagcgtgcttctcattgcctgtataccattgccgaagaacaagcgacaaacagtgctagtatctctgcttgtcacgctcagggaatgttaacggatttgctgttcattgcgctgattcagcaggatctggaactggcaccagaacgtattcgtcatagtgaagcgctggtgaaaaaactggtctgagtaaagaatgcgcgtataatgcccgcccggtttgtgttgttttgagagtttccttatggcgttgttaatcactaaaaaatgcatcaattgtgatatgtgtgaacccgaatgcccgaatgaggcgattagtatgggagatcatatctacgagattaacagcgataagtgtaccgaatgcgtagggcactacgagacaccaacctgccagaaggtgtgcccgatccccaatactattgtgaaagatccggcgcatgtcgagacagaagaacagttgtgggataaatttgtgctgatgcaccacgcggataaaatttaatattctactctggaagtagagtattaattatattactgggaagccttaacgccattatatttatttaattgatgacattagcataatcattcactaagttaatttatatagtatctgcccagacacttatttatagttattaaaggtgcgtccgactggttcaccggacgcaccttaagtacgtttccttgtgttataagaacagaaggatcagctgtaaaacagcaatgatgattttgatgacccgtttaatcaggtatcggcaatcagtcattcgtttttccttaaacaaggaatgcagccattcagattagcccttacatctccccaaaactgaacgtgcgagttattgagggtgcatgctgcactccacaccagagctttgacgacaccactcgtttcaatgggggaattctgtggcatggtgtaaagcacagcaaaatcttcaataacgaagccaattttaatgtacttacgaattggcggtcacgttaatctttccatcaatattgctttcttcgtaaaggctcgagtttttatgctaaagattgcaagttgcttgtaaaagataagtacactgatccataatcgctgttgttgagggtgcatgctgcacaaaattaaagttaaaaagtaaaacccccgttccttaccagttcgggggttttactttttaaagagaacggtattatttttaactttcaataattaccgtggcacaagcatagtgccgctcatctgccagcgttacatgcatatttgcaacgcccagcttttccgccagttttaatgcctcgccccatagccgtagccgtggtttgccgagctcatcattgaatacttcaaattgattaaacgccagaccattgcggatcccggtgccaaacgcttttgctgcggcttctttcacagcaaaacgcttcgccagaaaacgcaccggctggtggtgcgttttccagatagcccattcgttatcgcttaatacgcggcgtgccaggcgatcaccggatcgggcgatcaccgcttcgatgcgagcgatctccacaatatccgtgcctaaacctaatattgccattagccacgcgcttccagcatcagacgcttcatttctgccaccgcatctttcagtccggtcatcactgcacgaccaataatggcatgaccgatattcagttcatgcatctcagggatggcggcaatggctttcacgttgtgataggtcagaccgtgtccggcgttaactttcagaccgaggcttgcggcaaaggtcgcggctttggcgatacgcgccagctcttgcgcctgttcggcgtcagttttggcatcagcatagcaaccggtgtggatctcgataaacggtgcgccaacctctgccgcagctttgatctgctcttcatcggcgtcaataaacagagaaacctgaatcccggcatctgccagacgtttgcaggcatcgcgcattttgtcacgctgccctgcgacatccaggccgccttcggttgttacttcctgacgcttttccggtaccaggcagcaaaaatgtggcttcgtctcaacggcgatcgccagcatctcttcggtcaccgccatctccagattcatgcgggtatccagcgtctgacgcaggatgcgcacgtcgcggtcagtaatgtgacggcgatcttcacgtaaatgcacggtaatgccgtccgctcccgcctgctcggcaataaacgcggcctgcaccggatccgggtaagcggtaccgcgcgcgttgcgcagcgtagcgatatggtcaatgttgacgcctaacagtaattcagccatgacaatcctcatcattcataatgtgttttcaccgttcgcttaggcataaactgccggaacagttccctgctctttaaaggtttaccgccaagatacggcttaagcgccatgcgggtaaagcgtttcgcggcgcgcagtgtgtctgcgtcaggaaattcccgtgcgtttaacgcttttaactgccttccggtgaacgttttattgtcgataacgacgcttgcgataaaccctttttcttcgcgataacgatacgtcatggtgtcatctaccggctcgccgctacccgcacaatgggtaaaattgacgccataacccagatgcccgagcagtgccagttcaaagcggcgcagcgcgggttctggcgtaccagtgacccctgcaagagactgaatgcagtgcaagtaatcgaaaaaaagttcagagaagcgcgtctcgtattccagtacgcgggagagaagttcgttgatgtacagaccgctgtaaagcgtgataccgcttaatggcagcgccaggctgacggcttcagcactgcgcagcgttttgacttcgccacgcccgccaaaacgtagcaagagaggggtgaaaggctgtaatgcacctttcagggtagagcgtttagagcgtgcgcctttggcaaccagacgcacgcgcccgctttcctccgtgaagacgtccagcatcaggctggtttcgctccacgggcgactatgcaggacaaatgcgcgctgccagccttccatcggagttactcttaaagatcgtcaacgtaaccgagactgcgcagtgcgcgttcgtcgtcggcccaaccggatttcacttttacccacagttcaaggtgaacaggcgcttcgaacatttcctgcatgtctttacgcgcttcaatcccgatggttttgatcttggcccctttgttgccaatgaccatcttcttctgcccttcacgctcaacgagaatcaaaccgttgatgtcataaccaccgcgttcgttagagacgaaacgttcgatctccacggtcacggagtacggcagttcagcgccgaggaaacgcatcagtttttcgcggatgatttcagacgccataaaacgctgactgcgatcggtgatgtaatcttccgggaagtgatgagtcgcttcaggtagatgcttacgcacgattgccgcaatagtgtcaacattcagcccggtttcggcagagattggcacgatatcgaggaagttcatctggcttgccaggaactgcaggtgcggcagcagatcggctttctcctgcacgttgtccactttgttcaccgcgaggattaccggcgctttgccttcgcgcagtttgttgagcaccatttcgtcgtccggcgtccagcgggtgccttcaacgacaaaaatcaccagctcaacatcgccaatagagctgctcgccgctttgttcatcaggcggttaatggcgcgtttttcttccatatgcaggcccggtgtatcgacgtagatcgcctgatacgcgccttcagtatggatccccacaatgcggtgacgagttgtctgcgccttgcgggaagtgatggagattttctgccccagcagtttgttcaacaatgtggatttgccaacgttcggacgtccgacgatggcaataaatccgcagtaacttttatcgatgctcattccagctccagttttttcaacgcctgttcggcggcagcctgctcagccttacgacggctactacctgtgccaaccaccggttcactcaggccgctgacctggcagtggatagtaaattcctgatcgtgcgcttcgccacgtacctggactaccagataagtcggcagcggcagatggcgaccctgcaaatattcttgcaagcgcgttttcggatctttttgtttatcgcctgggctaatttcgtccaaacgagtttgataccagttgaggattaatttctcgacggtttgaatatcactgtcgaggaatacgccaccaattaatgcttcgacggtgtcggcgagaatactctcacgacgaaatccaccgcttttaagttcacctggccctaaacgtaagcactcgcctaactcaaattcgcgcgccagttccgccagcgtattgccacggaccagcgtggcgcgcatccggctcatatcgccttcatccacacgagggaaacggtgataaagcgcattggcgataacgtagctcagaatagagtcgcctaaaaattctaaacgctcgttatgtttactgctggcactacgatgagttaatgcctgctgcaacagttcctgatgattaaaagtgtagcccagcttccgttgaagccgattaattacgatggggttcatgcgataccaataaataaatgcgtcaacaattcagcacacgaaacagacctgatatacatggttctgctaactgcttcgctgcagtttcagtttaccggtatatggggaccaacgctgtttcgtgtgccgtggcaacctggaggtgccaaccttaaacttcgggggaatattctatacacaacgacgggggatgtcgttagccacgggagatttatctcataaataattcacgttgtcgccataacggcgacaacgtgaacgaagatggctattaatggatgccgccaatgcgacttaagcgcagaccagtcggccattcgccttcttgcttatcgaagctcatccagatagccgttgcccgaccgaccagattcgcttccggcacaaagccccagtaacggctgtccgcgctgttgtcgcggttgtcgcccatcatgaagtattgtcccggaggaacaatccaggttgccagttgttgccctggctgctggtaatacatccccacctgatcctgcgcaatcggcactgtcagaatgcggtgcgtcacatcacccagtgtctctttacgctcggaaagacgaattccattttctttggtttcgtttttcggcacttcaaagaatccgctggtcgcttccccaccattacggcgactgaaggtctgaacgaaatcgctcggttccacgttactgtaggtgaccggcagcgcgttttcacacgcctggccggaactgcatcccggttgaatcgtcagctctttactgaccggatcgtaagtgactttatcgcccggtaaacccaccgcgcgcttgatgtaatcaagctttggatcttccggatatttaaagaccacgatatcgccgcgtttcggatgaccggtttcgatcagcgttttctggtagataggatctttaatgccataagcaaacttctctaccagaataaaatcaccaattaacagagtcggcatcatgctaccactcgggatctggaacggttcataaataaagctacgcacaatcaatacgatagccagtaccggaaaaacagaagcaccggtttccagccagccaggcttcggcgcaacctttttcaacgttgctttatccagactgtccccggcagccgcctgcgccgctgcctgacgttcccgccgtttaggtgcgaaaaagaatttatccacgcaccataaaatgcccgtcaccagtgtggcaatcaccagaatcagggcaaacatattcgccatgccaactcctaagggttatttgttgtctttgccgacgtgcagaatggcgaggaacgcttcctgcggcagctcgacgttaccgatctgcttcatgcgtttcttaccttctttctgcttctgcagcagctttttcttacggctgatatcgccgccataacatttagccagtacgtttttacgcagctgtttcacggtggatcgcgcaatgatgtgcgtaccaatcgctgcctgaatggcgatatcaaactgctggcgtgggatcagatctttcatcttctccaccaactcgcgaccgcggttttggctattatcacggtgggtgatcaacgccagcgcatcaacacgttcaccgttgattaatacgtctacacgtaccatgtcggacgcctggaagcgcttgaagttgtaatccagagacgcataaccacggctggtagatttcaggcgatcgaagaagtcgagcaccacttccgccatcgggatctcgtacgtcagcgccacctgattaccgtggtaaaccatattggtctgcacgccgcgtttttctacgcacaacgtaataacgttgccgagatatgcctgcggcagcagcatgtgacactctgcaatcggctcgcgcagttcgtagatgttatttaccgcaggcagcttggatgggctgtcgacgtagataacttctctactcgtggtttcaacttcatacactacggtcggcgcagtggtgatcagatccagatcgtattcacgttccagacgttcctggatgatctccatgtgcagcaggccgaggaagccgcagcggaaaccaaagcccagcgcgctggagctttccggctcatagaacagactggcatcgttcaggctgagtttacccagcgcgtcacggaaggcttcatagtcgtcggaacttaccgggaacagaccggcgtatacctgcggtttgactttcttaaagccaggcagcgccttttctgccggattacgcgccagcgttaaggtatcgccgactggagcgccgtggatatctttaatcgcacatacgagccagcctacttcgccacatttcagttcagtgcggtcaacctgtttcggcgtgaagatgcccagacggtcggcgttataggtctgcccggtactcatgactttcactttgtcgcccttacgcagggtgccgtttttaatacggataagactaacaacgcccaggtagttgtcgaaccaactgtcgataattagtgcctgcaacgggccttccggatcgccttccggcggcggaatgtcgcgcaccagacgttcgagaacgtcctgcacaccaacgccggttttcgcactacagcgcaccgcgtcggtggcgtcgatgccgacgatatcttcaatttcttccgccacgcgttcaggatcggctgccggcaggtcaatcttgttcagtaccggcacaacttcgagatccatttccatggcggtgtagcagtttgccagggtttgcgcttctacgccctgcccggcgtcgaccaccagcaatgcaccttcacaggcagccaggctacgggaaacttcataggagaagtctacgtggcccggggtgtcgataaagttaagctgataggtttcgccgtcagacgctttgtagtccagcgtcacgctttgcgctttgatggtaatgccacgctcacgctcaagatccatggaatcgagaacctgcgcctccatttcacggtcagacaggccaccgcagatctggataatacggtcagacagcgtgcttttaccgtggtcaatgtgagctatgatgctaaagttacgtatattcttcataaagtatgattattgtgccttaatgcccggttaaccaggcttttagaagtcgctgttctgagcttaacgtctgtattaatagaaacgccgcattctacactacaacattgaggcgaggaaatgttcataccgtatggattgtggtatctggaaacgtcctcgcatttgttatgcaaaatgcaacaaagccagtgaaatcactggctcgcgtcttcgctagatgtttcaaatcgcacaaggccaggcggcaatgccacgcttaagatgatcggttgccattctgcccgggcagcaaacttacggctgtagccgcgcgcaatcaggaacccgccaataccaccgaggatcgcaccacataatgctgcgacgtcagaagcaaagagtagctgaaataggctagcgataaggaataatcccaccagcgggctcatataaaccagtaatgcggagctaagcaggctgccttcggcgatccccaattccactttttgccccggcactaacggctcatcacagggtacgacaatggtatgcgtggtttgcgggccaagtttatttaacacgcggctaccgcaaccggcgcgactagcgcagctgctgcaactagctttaacatcacaactgaccagcgcctgcccgttttgccaggagacgacggtagcccactctttgatcattgcgctgccccgaacttaatattctcggcaatgcgtttcgccgtttgcggcggcagttcaccgacaatggtgatttcggcgttatcacgtacgcttgtactgacggttctgcgtccggtgcgcaacatctgatcggtgctgcttggcgtagcgcggttaacgtttacgctgaagctgaataatccgtcggaatagagacgactttcgataggcatgttgtccatcgtcggtagcggacgtcgactactggaaacttcgctaaaaccctgtggcaaccaggttggcgtccagctgaatttagctttttcacctacaggaacagaaagcaacggcggcaaatttgccttcgccagcgtctgcatactgctgctgatatcctgattgacgttaaaagcaatcacgcgaaattgttccagcgtttcaccatcgcgatcaaggagatcaacccgcatcggtaatttgctttcggtgtccatccacacgatgtagctgtagcgtgtaccatctcgggcaaccacgcgaatgacttcgcaaagacgatcagcaatacgcgtgcgcccgacggagataaagtcgtagtaaggagaaaggcgtttgaaatcggtatagataaggcttggcagagaatcaacaatgtaatcgccattaagcgtgaacggttcaagtcccggttcaaaatagctgatttcattgccgcgctgtaccacttcccggcgcgggccatccatttgcaacaattgtgcaagaggacggttatcgaggcgtgcatgtcgataacgcagagactcaacaccctgtttattgatgctgatgaaactcagctcgtaattcagactctgactggccaggttcatctgctgtaataacgccccggacgcgggagtggcgctggcgttagcagagaataacaggctacctgtcactaaactcatggcaaaccaaagttgcttcattactggctttgcgttcctaaagtttgaattcctggcacctgtacagcggcttgctgggtttgcgcctgctcaaactgaagctgttcagagtggagtcggcgttgcagttcgtaatcctgcaacattgcattaatgcgacgacgctgctcctgtacctgctgctgttgaccattgtttgcggtcgcttcagaaggtactcccaggcttaccgggctggctttacccatcatcggcagtgtattaaataccggcgtttcgggctgctgggacgtttcagattgtccattatagtgctggacgccaacgataactgcaaggcttacgcatgcggctacgcccatttgggtaagctgtgccgcccacggacgtactttctgccagaatggcattttctgccattgatgcggcgcaggctgggcttccgggatcaatgtcgccggttgacgtactggctcttcttcaatggcggccatcacgcgactagagatatcgaaatggagcacctcgggagtatcaccccgcatactgtcacggattaagtgatagctttcccaggttttctgcatttctgggttatgagccagttcgttaagcagctcactatccagcgtttcgccatccattaaagcggaaagttgttctttctgcatgcctaatacccttatccagtatcccgctatcgtcaacgcctgataagcggttgaactttgttatcaatagcttccctcgctcggaagatacgactacgcaccgtacctaccggacaatccatgatagcggctatctcttcatagctcaggccatccagctcccgcaaggttattgccatgcgtaaatcttccgggagggactcaatagttcggaaaactatctgtctcagttcttcactcaacattaagttctcagggttgctaatttctttcaacgcgccgccactttcgaagttttcagcttcaatggcatccacatcactggaaggtggacgacgcccctgagcaaccaggtaatttttcgctgtatttacagcaatccgatacagccatgtataaaaagcgctatctccccggaagctatccagcgcacgataggctttaataaaagcttcttgtaccacatcgggaacatcaccgctcggcacatagcgggaaaccagactcgccactttatgctgatagcgcactaccagtaagttaaaggctttctgatctcccttctggacccgttcaaccaggacctggtccgttaactgctcgctcatccgaggtaaagtctccccaaaccaaatttccacgcgctatcgaaacgccactccattagctgcaatttgagcaagcaaagggttagagtgtctcgtttttgtaaagttccgtaacgcatctgtttttgtttgtcatgctgtagacggatcattatctatcattataagtctacagaatctgaacatcgcattatctgtgtagaaatgcccatttaactgcctgaagagtaacccaacggcctttttatttcaccacctaatcctccaccagccagtaacttctctttttctcgccgccctgcgtcagcgtgtttagcaactgtaacaaatattaaaatagcaggtgtttatccgcacaacatgatgctatgctgaccaaaccatgtttagtaaattaaacaaagaaaatgaatactctccctgaacatagttgtgacgtgttgattatcggtagcggcgcagccggacttagtctggcgctacgcctggctgaccagcatcaggtcatcgttctaagtaaaggcccggtaacggaaggtagtacattttatgcccagggcggtattgccgccgtgtttgatgaaactgacagcattgacagccatgtggaagacacattgattgccggggctggtatttgcgatcgccatgcagttgaatttgtcgccagcaatgcacgatcctgtgtgcaatggctaatcgaccagggggtgttgtttgatacccacattcaaccgaatggcgaagaaagttaccatctgacccgtgaaggtggacatagtcaccgtcgtattcttcatgccgccgacgccaccggtagagaagtagaaaccacgctggtgagcaaggcgctgaaccatccgaatattcgcgtgctggagcgcagcaacgcggttgatctgattgtttctgacaaaattggcctgccgggcacgcgacgggttgttggcgcgtgggtatggaaccgtaataaagaaacggtggaaacctgccacgcaaaagcggtggtgctggcaaccggcggtgcgagcaaggtttatcagtacaccaccaatccggatatttcttctggcgatggcattgctatggcgtggcgcgcaggctgccgggttgccaatctcgaatttaatcagttccaccctaccgcgctatatcacccacaggcacgcaatttcctgttaacagaagcactgcgcggcgaaggcgcttatctcaagcgcccggatggtacgcgttttatgcccgattttgatgagcgcggcgaactggccccgcgcgatattgtcgcccgcgccattgaccatgaaatgaaacgcctcggcgcagattgtatgttccttgatatcagccataagcccgccgattttattcgccagcatttcccgatgatttatgaaaagctgctcgggctggggattgatctcacacaagaaccggtaccgattgtgcctgctgcacattatacctgcggtggtgtaatggttgatgatcatgggcgtacggacgtcgagggcttgtatgccattggcgaggtgagttataccggcttacacggcgctaaccgcatggccagcaatagtttgctggagtgtctggtctatggctggagcgcggcggaagatatcaccagacgtatgccttatgcccacgacatcagtacgttaccgccgtgggatgaaagccgcgttgagaaccctgacgaacgggtagtaattcagcataactggcacgagctacgtctgtttatgtgggattacgttggcattgtgcgcacaacgaagcgcctggaacgcgccctgcggcggataaccatgctccaacaagaaatagacgaatattacgcccatttccgcgtcagtaataatttgctggagctgcgtaatctggtacaggttgccgagttgattgttcgctgtgcaatgatgcgtaaagagagtcgggggttgcatttcacgctggattatccggaactgctcacccattccggtccgagcatcctttcccccggcaatcattacataaacagataaaaagcctgggtcagcgccgtatacgcttcggaatagttctggtctggcccacgaatgactaagcgatcgctaaagcattctcccgcctgcggggagaatgccagcagcacccgatgcggcagtcgcgcttcgttttccgccacatccgtccgcaaacgtaaatgccagcccatgcttaatgccagctccgtaaaaccattaccaatctgctctggcagcactacgcagaaaaatccctcttcggtaatgcactccgccgcacaggtcagcaagcttgggtgatcaagcgtagtggtatagcgagcctgttcccgttgaggtgtgctgcactctactccctgctgatagtaaggtgggttactgatgattaaatcgaagcgtactgtctgctgtgtaatccactgctgaatatccgccgtatggacgttaatccgctctgcccacggggactggttgatattttcctgcgcctgcgcggcagcttcactttccagttcaactgcatcaatcatcacgctgtcatcggttcgctgcgccagcattaatgccagcaacccgctacccgcgccgatatcaaggcaacgttttaccccagccaccggtgcccatgcgcccaataaaataccatccgttcccactttcatcgcacagcgatcgtgagcaacaaaaaactgtttaaaagtaaatccattacgacgaagcacggatgtagactgactcatgaaaataaaaccttgcaggaaaaacggcgatagcaccgggtgagaacaatacccgagaagcgatatccatacaaacagatgaagattgcagccgtaacgtctataatcagcgccccacacagaggtagaacatgactgtaacgactttttccgaacttgaactcgacgaaagcctgctggaagccctccaggataaaggtttcactcgcccgaccgccattcaggctgccgccattccgcctgcgctcgatggccgtgatgtactcggttctgcgccgacaggcaccggtaaaacggcggcgtatctgctgccagcgttgcagcacctgctcgatttcccgcgtaagaaatccggtccgccgcgtattttgatcctcaccccaactcgcgagctggcgatgcaggtgtccgatcatgcccgcgaactggcgaaacatacgcatctggatatcgccaccatcaccggcggcgtagcctatatgaaccacgcggaagtgttcagcgaaaatcaggacatcgtggtcgccacgaccggacgtctgctgcaatacataaaagaagagaacttcgattgccgcgcggttgaaacgctgatcctcgacgaagcagaccgtatgctggatatgggcttcgctcaggatatcgaacatattgctggcgaaacgcgctggcgtaaacagaccctgctctttagcgcaacgctggaaggcgatgcgattcaggactttgccgagcgtctgctggaagatccggtggaagtttctgccaatccctccacccgtgagcgcaaaaaaattcatcagtggtattaccgcgccgatgatcttgagcataaaaccgcgttgctggtgcatctgttaaaacagccggaagcgacccgcagtattgtgtttgtgcgtaagcgtgagcgtgtgcatgagctggcaaactggctgcgcgaagcgggcatcaacaactgctatctcgaaggtgagatggtacagggcaagcgtaacgaagcgatcaagcgtttgaccgaaggtcgcgtaaacgtactggtcgcaaccgatgttgccgcgcgcggtatcgacattcctgacgtcagccacgtctttaacttcgatatgccgcgcagtggcgatacttatttgcaccgtatcggacgtaccgcgcgcgccggtcgtaaaggcaccgcaattagcctggtggaagcccatgaccatctgctgctgggtaaagtaggccgctatattgaagagccaattaaagctcgcgttattgatgagttacgcccgaaaacgcgtgcgccaagcgaaaagcagaccggcaagccaagcaagaaagtactggctaaacgtgctgagaagaaaaaagctaaagagaaagagaagccgcgggtgaaaaaacgccatcgcgacaccaaaaatattggtaagcgccgtaaaccaagcggaacgggcgtgccaccgcaaacgacagaagagtaatctcaatgccaggtttaagcctggtattaaaagtgctggcaaacgcaaaactgcctgatgcgctacgcttatcaggcctacgtggctcatgcaatatattgaatttgcacgatcttgtaggccggataaggcgttcacgccgcatccggcatgaataaagcgcactttgtcgacaagttaaatgccgggtttaatcccgacattatttttatccagccacaaaactctcttcaacacactgaataaaagtgtgcatcgccgggctaaccgcttttccagcatgatgtgcgcacatggccgtaatggtctggctctgttcgccaaaaggcaattcaattaattctccgcactccaactcttttgccaccgcaaagcgcggtaggtagctgaccccgatattcgccgcgacacaacgcttgatgctttcgatacttataagctcaatggtgttttccaccgtgatccgccgctgacgcagcgtgctctcaaatatctgccggaagacacattgcggttcgttgataataaagctacaggcgttatgtcttcccggctcagtaaaatcgacatctgcaatttgcggactagccaccagcaccagactttgttcacccaactctcgtcgattcagagcatcatcattccctacacgataaaagacgccaacatcggcctcatcattcagtagcgcatcacggatcacgtaacagttcaggctctgcaagcttaaacgcacttttggggcgcgttgccgaaaacgctgcaacacctgcggcattcggtaagagagcaacgtttcgccgctaacaacgcgtagttccccgtccggatcactctcctttttggcagcctcacgaagcgtatccatcactcgggtaagttcataaatgtgcggcagcaacttttttccttcgcgggtaaggcacatccgtcggccaattttctcaaataactggacactaaactcctgctcaagctgctgaatatgaaaagtcaccgtgctttgtgtacagcacaatttttggctagctcgcaaaaaggaaccctcttccaccacggttttaagcgtaataaaacggcgcagatccataaccccaaacctatcgaaaatatcgaatctagaatataaaaacattcatttttttaaatgttccgtgtcgggtactgtctaccaaaacagaggagataacaagtgacaccgacccttttaagtgctttttggacttacaccctgattaccgctatgacgccaggaccgaacaatattctcgcccttagctctgctacgagccatggatttcgtcaaagtacccgcgtgctggcagggatgagtctgggatttttgattgtgatgttactgtgtgcgggcattagttttagtctggcagtgattgacccggcagcggtacaccttttgagttgggcgggggcggcatatattgtctggctggcgtggaaaatcgccaccagcccaacaaaggaagacggacttcaggcaaaaccaatcagcttttgggccagctttgctttgcagtttgtgaacgtcaaaatcattttgtacggtgttacggcactgagcacgtttgttctgccgcaaacacaggcgttaagctgggtagttggcgtcagcgttttgctggcgatgattgggacgtttggcaatgtgtgctgggcgctggcggggcatctgtttcagcgattgtttcgccagtatggtcgccagttaaatatcgtgcttgccctgttgctggtctattgcgcggtacgcattttctattaacgaaaaaaagcggaagaggtcgccctcttccgcttagtaacttgctacttaagccttacaggctttcagtaaaggtacgagcgataacgtcgcgctgctgttccggagtcagagagttaaagcgaactgcataaccggatacacggatggtcagctgcggatatttttccggatgcttaactgcatcttccagagtttcgcgacgcagaacgttaacgttcaggtgttgaccaccttcaacgcgaacttctggtttcacttctactggaacttcacggtattcaatgtcacccagtttgcttactgcaaccacttcatcttctgcataacctgcttttgcaacgatgcaacgcgcttcgcctttttcgctgtccagcagccagaaagagttcagcagatcgtcgttagcggctttagtaatctggatacctgtaatcatgtgatgcctccccggcaaaattatttgatttgttcagcctgtcgcggccaattggtaaaaccattgttgcttgagtgtatatatactcctcaaacacccttgaatctttgatttaaatcaataaaaaccacacatcaagtatggtcgcaaatggattttattgttttacatcaacttatgcgggtgtgaaattttaccaatttacatttttttgcactcgtttaagtctaaaaaatgagcatgattttgttctgtagaaagaagcagttaagctaggcggattgaagattcgcaggagagcgagatggctaacgaattaacctggcatgacgtgctggctgaagagaagcagcaaccctattttcttaatacccttcagaccgtcgccagcgagcggcagtccggcgtcactatctacccaccacaaaaagatgtctttaacgcgttccgctttacagagttgggtgacgttaaagtggtgattctcggccaggatccttatcacggaccgggacaggcgcatggtctggcattttccgttcgtcccggcattgccattcctccgagtttattgaatatgtataaagagctggaaaatactattccgggcttcacccgccctaatcatggttatcttgaaagctgggcgcgtcagggcgttctgctactcaatactgtgttgacggtacgcgcaggtcaggcgcattcccacgccagcctcggctgggaaaccttcaccgataaagtgatcagcctgattaaccagcatcgcgaaggcgtggtgtttttgttgtggggaagccatgcgcaaaagaaaggggcgattatagataagcaacgccatcatgtactgaaagcaccgcatccgagcccgcttagcgcgcatcgtggattctttggctgcaaccattttgtgctggcaaatcagtggctggaacaacgtggcgagacgccgattgactggatgccagtattaccggcagagagtgagtaaatttgcggggaaatgccggatggcagagttgccacccggctgatttatcaggctttattctgacgccaccattcaccaagcaaaacgccggttgcgacagagatattcagcccggcaacgttgcccgtaccgtcaatcttcacgcgcagatcgttcggatcgcgtgcggcatccggtaacccttcatattcctgacccagcaccagtaccattttcgctggcagactagttttgaacagcggtttaccctgctcgctggaagtggtcactacggtgtaacctgcctgacggaaatcatccagcacgttaacaatgttgtcgccagtaatcggctgaacgtgctctgcgccgccttctgcggtacggatagccgccccgctctccagcagtgccgcatcctgcaccacgacacctttcacgccgaagtgcgcgcagctgcgcatcatgccacccaggttatgcgggttagattcgttttccagtgccagaacgcaatcctgcgcgcctgcctggcttacccactgctgcacggttgtaccgttacgctttttgatcaagaagcaaacgccgccgtgatgttccgtgccactcgcttttgtcaattccgcttcatccaccacatggtacgctttgcggtttgctgccatccagcgcaaagcttctttaaaacgcggcgttacactctggataaaccaggcgcgaacaatcgcttccggacggctctggaaaagtgcctgacatgcattttcgccgtagacgcgggtttcttccgcacgctgacgacgcaacacttccggatcaataaaacttttaccactgatgccaccgtgatcggccttttccggcgtctcatcacccggcgcgcgggaaaccgtgcgccacgggctatcttcccacttgcggtcacggggctgactctgtttgtcatcgcgggcggggcgacggccaccgtcagcacgagattttcctggacgcccgccccctttcccggtacgcgggttgtgggtacgtttatcagaatcatcatcactgcggacatacatcactttgaccttgccgcttttacctttcatttcatcgttcatgcttttctccaccagcgctgcgcgaagcgcgcagattacccgaagtccgcgcggttcgccatgatttcgtaccaaagcctgcgactatcatacctattgaataaaacagattgttgtctggaacaatgtccccgataatatgtaacatattagaaacataccggcgtcgttgccgataagtctccttactcatcccgaggttagttatgaataccgtttgtacccattgtcaggccatcaatcgcattcccgacgatcggatcgaagatgcggcaaaatgcggacgctgcggtcacgacttgtttgacggagaggtgattaatgcgaccggtgaaacactcgacaaattgctgaaggatgatctacctgtggtgatcgacttctgggcaccgtggtgcggcccctgccgtaatttcgcaccaatttttgaagatgtcgcgcaagagcgtagcggtaaagtgcgctttgtgaaagtgaataccgaagctgaacgtgaattgagcagtcgctttggaattcgtagtataccgacgatcatgattttcaaaaacggtcaggttgtcgacatgcttaatggcgcagtaccgaaagcgccgttcgatagctggctgaacgaatctctttaatcttaccggggcgcatcttgtgccccgttttctcctctgcgacaatggcgttttttcgacgctctcttatgaccgaaaacgctgttctccagttacgcgccgagcgtattgcgcgcgcaacacgtccttttcttgcccgcggtaatcgcgttcgtcgctgccaacgctgtcttttgccagagaaattatgtctctgtagcacaattaccccagcacaagcaaaaagtcgcttctgtttgctgatgttcgacaccgagccaatgaagcccagtaataccgggcgtctcattgctgatattttgcctgataccgttgcgtttcaatggagccgtaccgaacccagccaggatttgctggagttggtgcaaaacccggactatcagccaatggtggtctttcccgctagctatgctgatgagcaacgggaagtgatcttcacaccacctgccggtaagccaccgctgtttatcatgctcgatggtacctggccggaagctcgcaagatgtttcgtaaaagtccgtatctggataatcttcccgtcatttccgtcgatctttcccggctttctgcctatcgcctgcgtgaagcccaggctgaaggccaatattgtactgccgaggtagccatcgcactgttagatatggccggcgataccggggcggcggcagggttaggcgagcattttacccgctttaaaacacgctatctggcaggaaaaacgcaacatctgggtagcatcacagcagaacagttagaaagcgtttaaaatcattcggtcacttctgcgggagaccggtatgagtcagcgaggactggaagcactactgcgaccaaaaagcatagcggtaattggcgcgagcatgaaacccaatcgcgcaggttacctgatgatgcgtaacctgctggcgggaggctttaacggaccggtactcccggtgacgccagcctggaaagcggtgttgggtgtgttggcctggccggatattgccagcttgccctttacacccgaccttgcggttttatgtaccaatgccagccgtaatcttgctcttctggaagagctcggcgagaaaggctgtaaaacctgcattattctttccgccccggcaagccaacacgaagatctccgcgcctgcgccctgcgccataacatgcgcctgcttggaccaaacagtctgggtttactggctccctggcaaggtctgaatgccagctttagccctgtgccgattaaacgcggcaagctggcgtttattagccaaagcgctgccgtctccaacaccatcctcgactgggcgcaacagcgtaagatgggcttttcctactttattgcgctcggcgacagcctggatatcgacgttgatgaattgcttgactatctggcacgcgacagtaaaaccagcgccatcctgctctatctcgaacagttaagcgacgcgcgacgctttgttagcgcggcccgtagtgccagccgtaataaaccgattctggtgattaaaagcggacgtagcccggcggcacagcgactgctcaacacgacggcaggaatggacccggcatgggatgcggctattcagcgtgccggtttgttgcgggtacaggacacccacgagctgtttagcgcggtggaaacccttagccatatgcgcccgctacgtggcgaccggctgatgattatcagcaacggtgctgcgcctgccgcgctggcgctggatgccttatggagtcgcaatggcaagctggcaacgctaagcgaagaaacctgccagaaactgcgcgatgcactgccagaacatgtggcaatatctaacccgctcgatctacgcgatgacgccagcagtgagcactatattaaaacgctggatattctgctccacagccaggattttgacgcgctgatggttattcatagccccagcgccgctgctcccgcaacagaaagcgcgcaagtattaattgaagcggtaaagcatcatccccgcagcaaatatgtctctttgctgacgaactggtgcggcgagcactccagccaagaggcacgacgtttattcagcgaagccgggctgccgacctaccgtaccccggaaggaaccatcactgcttttatgcatatggtggagtaccggcgtaatcagaagcaactacgcgaaacgccggcgttgcccagcaatctgacttccaataccgcagaagcgcatcttctgttgcaacaggcgattgccgaaggggctacgagcctcgatacccatgaagttcagcccatcctgcaagcgtatggcatgaacacgctccctacctggattgccagcgatagcaccgaagcggtgcatattgccgaacagattggttatccggtggcgctgaaattgcgtagcccggatattccacataaaagcgaagttcagggcgtcatgctttacctgcgtacagccaatgaagtccagcaagcggcgaacgctattttcgatcgcgtaaaaatggcctggccacaggcgcgggtccacggcctgttggtgcaaagtatggctaaccgtgctggcgctcaggagttgcgggttgtggttgagcacgatccggttttcgggccgttgatcatgctgggtgaaggcggtgtggagtggcgtcctgaagatcaagccgtcgtcgcactgccgccgctgaacatgaacctggcccgctatctggttattcaggggatcaaaagtaaaaagattcgtgcgcgcagtgcgctacgcccattggatgttgcaggcttgagccagcttctggtgcaggtttccaacttgattgtcgattgcccggaaattcagcgtctggatattcatcctttgctggcttctggcagtgaatttaccgcgctggatgtcacgctggatatcagcccgtttgaaggcgataacgagagtcggctggcagtgcgcccttatccgcatcagctggaagaatgggtagaattgaaaaacggtgaacgctgcttgttccgcccgattttgccagaagatgagccacaacttcagcaattcattagccgagtcaccaaagaagatctttattaccgctactttagcgagatcaacgaatttacccatgaagatttagccaacatgacacagatcgactacgatcgggaaatggcgtttgtagcggtacgacgtattgatcaaacggaagagatcctcggcgtcacgcgtgcgatttccgatcctgataacatcgatgccgaatttgctgtactggttcgcagcgatctcaaagggttaggcttaggtcgacgcttaatggaaaagttgattacctatacgcgagatcacggactacaacgtctgaatggtattacgatgccaaacaatcgtggcatggtggcgctagcccgcaagctcgggtttaacgttgatatccagctcgaagaggggatcgttgggcttacgctaaatcttgcccagcgcgaggaaagttgagtaaggtactggaaatgttgaccacttaatcgggactggtgttattattgcccgcttatgtcgtctgcattgcacagaggacccttcaatgaacagagaagaaatgcactgtgatgttgagtaaatttaagcgtaataaacatcaacaacaccttgcccaactacccaagatttctcaaagtgttgatgatgtcgatttcttttacgctcccgccgacttccgggagacgctgctggaaaaaatagccagcgcgaagcagcgcatttgcattgtcgccctgtatctcgaacaggatgacggtggcaaaggcattctgaacgcgttgtatgaggctaaaaggcagcgtccggaactggatgtgcgggtgctggtcgactggcatcgtgcacaacgtggacgcattggcgctgcggcatctaacactaacgctgactggtactgccgcatggcgcaggaaaatccgggcgtagatgttccggtttatggcgttccaatcaatactcgtgaagcccttggtgttctgcactttaaaggctttatcatcgacgatagcgtactttatagcggtgccagcctgaacgatgtttacctgcatcagcacgataaatatcgctacgaccgttatcatctgatccgtaaccgtaagatgagtgacattatgtttgaatgggttacacagaatattatgaatggccgcggcgttaatcgtctggatgatgttaatcggccaaaaagcccggaaatcaagaacgatattcgtctgttccgccaggagctgcgtgatgccgcttatcatttccagggcgatgccgacaacgatcagctttctgtaacgccgctagtggggctggggaaaagcagtctgttgaacaagaccattttccatcttatgccttgtgccgagcagaaactaaccatctgtacgccatacttcaacctgccagcaatccttgtgcgcaatattatccagttgctgcgcgaagggaaaaaggtcgaaattattgttggtgataaaaccgcgaatgacttctacattccggaagatgaacctttcaagataattggcgcattgccttatctctatgagatcaatctgcgtcgtttcctgagccgtttgcagtattacgtcaatactgaccagctagtggttcggttatggaaagatgacgacaacacctatcacctgaaagggatgtgggttgatgataagtggatgttgatcaccggtaataacctgaacccgcgcgcctggcgtctggatctggaaaacgccattttgatccacgatccgcaacttgagctggcgccacagcgagagaaagaactggagctgatccgcgagcataccaccatcgttaagcactatcgcgatctgcaaagtattgccgattatccggtgaaggttcgtaaactcatccgccgtttgcgccgtatccgcatcgaccgattaattagccgcatcctgtaatcacaaccccgtcctgtacggggtttgttttttggaggccacgttttgcgtattctttttgtctgttcgctattgttactttctggatgcagccatatggctaacgatagctggagcgggcaggataaagctcaacactttatcgccagcgcgatgctttccgccgccggaaatgaatatagtcagcatcaggggatgagccgggatcgcagtgccatgtttggattgatgttctctgtcagtttgggggcgagtaaagagctttgggatagccgccccgaagggagcggctggagctggaaggatttggcctgggatgtcgccggtgcaagcaccggctataccgtctggcaactgacccgtcattaaagacgcatccccttccctttgcgatgtagcatcaaagaaaccagaaacgccaccacggccatcaaggtcacataccagaagaaggctgtttccattcctatacttttcaggctcaacgctacgtactccgcgctaccaccaaatatagcattagcgaccgcataactcagaccaacgcctaatgcgcgaacctgtgccgggaacatctcagccttcagtattccactgatacttgtataaaaactcactatcagcagggcacacatcaccagaccaaaagcggcataagggctggaaacgttttgcaatgcactgagaataggaacggtaaaaatggctgccaggctaccgaaacataacatactggtacggcgaccaatcttatcgctcagcgcgccaatgagtggttgaataagcatgaatacaaacaatgcggcagtcataatgccactcgccacgttggcatgcattcccgcagtatttaccagatacttctgcatataagtagtgaaggtatagaaacaaagggagcccgcagcggtaaaaccgagaaccatgatgaatgcacggcgattgcgccataatcctttcagagatccagcttcttttaaagcgcgcgtttcttgttggctagtttcatctaactgacgacgtaaccacaacgccacaacagctaacacagctcctaacgcgaaaggaatacgccatccccactctctgagtgcagcgtcttccatggtgtgttgtaaaaccacgacaaccagtagggctagcagttgtccgccgatcaacgtcacatactgaaaacttgcgtaaaaacctttgcgcccttcaacggcaacttcactcatataggtggcgctggtgccatattctccgccaacagataatccctgaaataaacgagcgagaagcaataatgccggagcccacgtacctatagtttcataacctgggaggcaggcgataaccaggcttccgaaacacatcatacacacgcttaacagcatgctttttttgcgaccatgtttatcggctatgcggccaaatagccaaccgcctattgggcgcatcaggaatcccgcagcaaaaacacctgctgtttgtagtagttgagtcgtcgtgttcccggaagggaagaagatgtgggcaaagtagagactacagaagctgtagacatagaaatcgaaccactcgaccagattaccactagaggcccccacaatcgcccaaatgcggcgacgagtatcactacttgtcagtttgctgtctgccgttacagtactttcagccatgccattatgtctcctgccgtaatccgatgcttttgtcggtcgcttttgtttattttttttgtaaaggaaatattatacatttgttgcatatcattatgcaaccttaaccatgaatttagttagcaggaaaatggttattgaggagcttaaggataaatttctggtaaggaggacacgtatggaagtgggcaagttggggaagccgtatccgttgctgaatctggcatatgtgggagtataagacgcgcagcgtcgcatcaggcatttttttctgcgccaatgcaaaaaggccatccgtcaggatggcctttcgcataatttgatgcctggcagttccctactctcgcatggggagaccccacactaccatcggcgctacggcgtttcacttctgagttcggcatggggtcaggtgggaccaccgcgctacggccgccaggcaaattctgttttatcagaccgcttctgcgttctgatttaatctgtatcaggctgaaaatcttctctcatccgccaaaacagcttcggcgttgtaaggttaagcctcacggttcattagtaccggttagctcaacgcatcgctgcgcttacacacccggcctatcaacgtcgtcgtcttcaacgttccttcaggacccttaaagggtcagggagaactcatctcggggcaagtttcgtgcttagatgctttcagcacttatctcttccgcatttagctaccgggcagtgccattggcatgacaacccgaacaccagtgatgcgtccactccggtcctctcgtactaggagcagcccccctcagttctccagcgcccacggcagatagggaccgaactgtctcacgacgttctaaacccagctcgcgtaccactttaaatggcgaacagccatacccttgggacctacttcagccccaggatgtgatgagccgacatcgaggtgccaaacaccgccgtcgatatgaactcttgggcggtatcagcctgttatccccggagtaccttttatccgttgagcgatggcccttccattcagaaccaccggatcactatgacctgctttcgcacctgctcgcgccgtcacgctcgcagtcaagctggcttatgccattgcactaacctcctgatgtccgaccaggattagccaaccttcgtgctcctccgttactctttaggaggagaccgccccagtcaaactacccaccagacactgtccgcaacccggattacgggtcaacgttagaacatcaaacattaaagggtggtatttcaaggtcggctccatgcagactggcgtccacacttcaaagcctcccacctatcctacacatcaaggctcaatgttcagtgtcaagctatagtaaaggttcacggggtctttccgtcttgccgcgggtacactgcatcttcacagcgagttcaatttcactgagtctcgggtggagacagcctggccatcattacgccattcgtgcaggtcggaacttacccgacaaggaatttcgctaccttaggaccgttatagttacggccgccgtttaccggggcttcgatcaagagcttcgcttgcgctaaccccatcaattaaccttccggcaccgggcaggcgtcacaccgtatacgtccactttcgtgtttgcacagtgctgtgtttttaataaacagttgcagccagctggtatcttcgactgatttcagctccatccgcgagggacctcacctacatatcagcgtgccttctcccgaagttacggcaccattttgcctagttccttcacccgagttctctcaagcgccttggtattctctacctgaccacctgtgtcggtttggggtacgatttgatgttacctgatgcttagaggcttttcctggaagcagggcatttgttgcttcagcaccgtagtgcctcgtcatcacgcctcagccttgattttccggatttgcctggaaaaccagcctacacgcttaaaccgggacaaccgtcgcccggccaacatagccttctccgtccccccttcgcagtaacaccaagtacaggaatattaacctgtttcccatcgactacgcctttcggcctcgccttaggggtcgactcaccctgccccgattaacgttggacaggaacccttggtcttccggcgagcgggcttttcacccgctttatcgttacttatgtcagcattcgcacttctgatacctccagcatgcctcacagcacaccttcgcaggcttacagaacgctcccctacccaacaacgcataagcgtcgctgccgcagcttcggtgcatggtttagccccgttacatcttccgcgcaggccgactcgaccagtgagctattacgctttctttaaatgatggctgcttctaagccaacatcctggctgtctgggccttcccacatcgtttcccacttaaccatgactttgggaccttagctggcggtctgggttgtttccctcttcacgacggacgttagcacccgccgtgtgtctcccgtgataacattctccggtattcgcagtttgcatcgggttggtaagtcgggatgacccccttgccgaaacagtgctctacccccggagatgaattcacgaggcgctacctaaatagctttcggggagaaccagctatctcccggtttgattggcctttcacccccagccacaagtcatccgctaatttttcaacattagtcggttcggtcctccagttagtgttacccaaccttcaacctgcccatggctagatcaccgggtttcgggtctataccctgcaacttaacgcccagttaagactcggtttcccttcggctcccctattcggttaaccttgctacagaatataagtcgctgacccattatacaaaaggtacgcagtcacacgcctaagcgtgctcccactgcttgtacgtacacggtttcaggttctttttcactcccctcgccggggttcttttcgcctttccctcacggtactggttcactatcggtcagtcaggagtatttagccttggaggatggtccccccatattcagacaggataccacgtgtcccgccctactcatcgagctcacagcatgtgcatttttgtgtacggggctgtcaccctgtatcgcgcgcctttccagacgcttccactaacacacacactgattcaggctctgggctgctccccgttcgctcgccgctactgggggaatctcggttgatttcttttcctcggggtacttagatgtttcagttcccccggttcgcctcattaacctatggattcagttaatgatagtgtgtcgaaacacactgggtttccccattcggaaatcgccggttataacggttcatatcaccttaccgacgcttatcgcagattagcacgtccttcatcgcctctgactgccagggcatccaccgtgtacgcttagtcgcttaacctcacaacccgaagatgtttcacttcagagttgcgaaaatttgagagactcacgaacaactttcattgttcagtgtttcaattttcagcttgatccagatttttaaagagcaaatatatcaaacaagacttaacagtctgttttgagatattgaggtcggcgactttcactcacaaaccagcaagtggcgtcccctaggggattcgaacccctgttaccgccgtgaaagggcggtgtcctgggcctctagacgaaggggacacgaaaattgcttatcacgcgttgcgtgatattttcgtgtagggtgagctttcattaatagaaagcgaacggccttattctcttcagcctcactcccaacgcgtaaacgccttgctattcacttttcatcagacaatctgtgtgagcactgcaaagtacgcttctttaaggtaaggaggtgatccaaccgcaggttcccctacggttaccttgttacgacttcaccccagtcatgaatcacaaagtggtaagcgccctcccgaaggttaagctacctacttcttttgcaacccactcccatggtgtgacgggcggtgtgtacaaggcccgggaacgtattcaccgtggcattctgatccacgattactagcgattccgacttcatggagtcgagttgcagactccaatccggactacgacgcactttatgaggtccgcttgctctcgcgaggtcgcttctctttgtatgcgccattgtagcacgtgtgtagccctggtcgtaagggccatgatgacttgacgtcatccccaccttcctccagtttatcactggcagtctcctttgagttcccggccggaccgctggcaacaaaggataagggttgcgctcgttgcgggacttaacccaacatttcacaacacgagctgacgacagccatgcagcacctgtctcacggttcccgaaggcacattctcatctctgaaaacttccgtggatgtcaagaccaggtaaggttcttcgcgttgcatcgaattaaaccacatgctccaccgcttgtgcgggcccccgtcaattcatttgagttttaaccttgcggccgtactccccaggcggtcgacttaacgcgttagctccggaagccacgcctcaagggcacaacctccaagtcgacatcgtttacggcgtggactaccagggtatctaatcctgtttgctccccacgctttcgcacctgagcgtcagtcttcgtccagggggccgccttcgccaccggtattcctccagatctctacgcatttcaccgctacacctggaattctacccccctctacgagactcaagcttgccagtatcagatgcagttcccaggttgagcccggggatttcacatctgacttaacaaaccgcctgcgtgcgctttacgcccagtaattccgattaacgcttgcaccctccgtattaccgcggctgctggcacggagttagccggtgcttcttctgcgggtaacgtcaatgagcaaaggtattaactttactcccttcctccccgctgaaagtactttacaacccgaaggccttcttcatacacgcggcatggctgcatcaggcttgcgcccattgtgcaatattccccactgctgcctcccgtaggagtctggaccgtgtctcagttccagtgtggctggtcatcctctcagaccagctagggatcgtcgccttggtgagccgttaccccaccaacaagctaatcccatctgggcacatccgatggcaagaggcccgaaggtccccctctttggtcttgcgacattatgcggtattagctaccgtttccagtagttatccccctccatcaggcagcttcccagacattactcacccgtccgccactcgtcagcgaagcagcaagctgcttcctgttaccgttcgacttgcatgtgttaggcctgccgccagcgttcaatctgagccatgatcaaactcttcaatttaaaagtttgatgctcaaagaattaaacttcgtaatgaattacgtgttcactcttgagacttggtattcatttttcgtcttgcgacgttaagaatccgtatcttcgagtgcccacacagattgtctgataaattgttaaagagcagtgccgcttcgctttttctcagcggcgcggggtgtgcataatacgccttcccgctacagagtcaagcatttctttgcttttctctgttgagattctcaggagaaccccgccgacccggcggcgtgtttgccgttgttccgtgtcagtggtggcgcattatagggagttattccggcctgacaagcgaaaaatataaaaactttatcgttcgctcacttttcaggcaaaacatcttaaatatagtcttttccgtctaacttatagacaaaaacgagccccgaagggctcgttttatcatttactggacggcgacaatccggtcttcattaacttccaggcgaatcactttacccggaaccaattcaccagacagtatttgctgtgccagcgggttttcgatctgctgctgaattgcacgtttcagaggacgtgcaccatagaccggatcgtaaccgttctcgctcagcagtttcagcgcctcgtcagaaatgtggatttcataaccacgttcttccagacgtttgtacagacgtttcaactgaatctgcgcaatgctggcaatgtgctgttcacccagcggatggaagaccaccacttcatcgatacggttaatgaattccggacggaagttatggcttaccacaccgagcaccagctctttcatgtgcgcataatccagttcaccgaagcgttcctgaatcagatcggaaccgaggttagaggtcataatgacgaccgtattacggaagtcgaccgttctcccttgcccgtcagtcagacgcccatcatccagtacctgcaacagaatgttgaagacatccggatgcgctttttccacttcatccagcaggatgacggaatacggacgacgacgcaccgcttcggtcaggtagccaccttcttcataaccgacatatcccggaggcgcaccaaccaaacgagacacgctgtgtttctccataaactcggacatatcgatacggaccatcgcctcgtcgctatcaaacataaagttcgccagcgccttacaaagctctgttttccccacaccagttgggccgaggaacaggaaactaccaatcgggcgatttggatccgccagccccgcacggctacgacgaatagcgttagataccgcatcaaccgcttcgttctgaccaattacgcgatggtgcagttcttgctccatacgcagcagtttttcgcgctcgctttccatcatgcgagaaaccggaatccccgtccaacgcgccagcacttcagcaatttcggcgtcggtcactttattacgcaacagacgcatagttttgccttcgagctgcgttgcggcttccagttgcttttccagttccgggattttgccgtattgcagttcagacatccgcgccaggtcccccacacggcgagcctgttcaatagcgattttcgcctgttccagttccgctttaatggtctgcgtaccagaaaggcttgccttctctgctttccactcttcttctaactcggagtactgacgttctttgtcgctcagttcttcgttgagcatatccagacgttttttactggcttcatcagactctttcattaacgcctgttgttccagtttgagctggatgatacgacgatcgagtcggtcgagttcttctggtttactgtcaatctgcatacgaatgctggatgctgcttcatcgatcaggtcgatggctttatccggcagctgacggtcagcaatgtagcgatgagacaacgtcgccgctgcaacaattgccgggtcagtaatttgcacatggtggtgcaattcgtaacgttctttcaggccacgcagaatcgcaatggtatcttcaacagaaggctcggcaacaaacactttctggaaacgacgttccagcgcagcatctttttcaatgtactggcgatattcgtcaagcgtcgtggcacctacgcagtgcaattcaccacgcgccagcgccggtttcagcatgtttccggcgtccattgcgccatcggctttacccgcgccgaccatggtatgtaattcgtcgataaataggatgacgttgccttcctgtttggcaagatcgttaagcacgccttttaaacgttcttcaaactcaccgcgatatttcgccccagccaccagcgcgcccatatccagcgccagtacccggcggcctttcaacccttccggcacttcgccgttgataatacgctgcgccagaccttcaacgatggcagttttaccgacgccgggttcaccaatcagtaccgggttatttttagtacgacgttgcagcacctgaatggtacggcgaatttcttcatcacgaccaatcaccggatcgagtttgccctgttcggctcgttcggtaaggtcgatggtatattttttcaaagcctgacgttggtcttcagcaccttgatcgttcacgctttcacctccacgcatttgttcaatcgcttgagtaatgttggcggtggtcgcccctgctgctttcaggatgtcggccagcgtgccgcgagactcaagtgccgccagaacgaacagttcactgctgataaagttatcaccacgtttttgcgccagcttgtcgcaaagattaagaacgcgcaccagatcctgacttggctggacatcaccaccagtaccttcaacctgcggtaaacgatttaatgcctgattgatatctgtgcgcaactggccagcatttatgccagcggatgttaataaaggactaacgctacccccttcctgattcagcagggcgctcattaaatgaagtggttcgataaattggttgtcgtgcccgagtgcaagactttgggcatcggcaagagcaagctggaatttattagtaagacgatccagacgcataactcctcccataacggatcaaagttgctactggagattaaatgaggtcatccctcaattattcaaggttattgaccagattaatgtgaaaagaaaatcacgcgtaccggatcgtcttgattctttaggttatatcagccaaatgaaacttgccatacgaccggtggtcttgtcgcgacgataagagaagaaagtctcattttccgtatatgtacaacggtcgccgccgaaaatttgctcaacacccacgttcgccagacgctgccgggcaagctgataaatatccgccagatacttatcaccatgctgaatgaaagctgcacttgctttagcgtctactgccataaacgcctcgcgaacctccccccccacttcgaacgcgcgtggaccaattgccggccctaaccaggcgagaatattttccggattatcagcaaaacaggaaaccgtctcttccagcacgcctgcgcacagtccacgccagccagcatgagcggcggcgacttccgttcccgctcgattgcaaaacagcacagggaggcagtcggcagtcatcactgcgcaaaccgtgccgggcgtattgctataagaggcatccgcccgtttactggcataaggttcgccagtgagcttaagcacatctttgccgtgtacctgctcaagccagaccggtttagaaggcaaattgcccgcagcaaaaagtcgcttgcgattctcctcaacgtgatccgggttatcgccacaatgggcaccgaggttgagactgtcatacgggggcaagctcacgccgccgatacgagtggagctacaggccgcaacaccttttggctgcggccactgcgggacaatcagcttactcataaccagtccacttcatccttatgttcttcgaaatcggcgcgcatcacctcaatcagctccaccatatcttgtggaataggcgcatgccattccatttcgatgccggagatcgggtgataaagacgcagcatggttgcatgtagcgcctggcggtcaaacttacgcagcgtggagataaatgcttcgctagcaccttttggcggacgcggacggccaccataaaccggatcgcccaccagcggatgagtgatatgggccatatgcacgcggatctggtgcgtacgtccagtttccagacgcaaccgcagacgcgtgtgcacacggaagtgttccatgatgcgatagtgagtcaccgctggtttgcccatcggatgcaccgccatatgggtacgtttggtcgggtggcgactgattggctcgtccaccgtgccacctgcggtcatatgaccaatcgccaccgcttcatactcacgagtaatttcacgccgttgcaaagattcgactaaacgcgtctgagccggaacggtttttgccacaaccatcaggccagtggtgtctttatccagacgatggacgatgcccgcacgcggtacatcggcaatgggtggatagtaatgaagcaacgcattcagtaccgtgccatccgggttacccgcgccaggatgtaccaccaggtcgcgcggtttattaatgataataatgtcttcatcttcatagacgatatccagcgggatatcctgcggttcaaaacgcgcttcttcttcaatctcagcgttgatggcaacctgctcgccacccaatactttttctttcggcttatcacaaactttgccgttaaccagcactcgctggtcgaggatccattcttttattcggctacgactataatccgggaacatttcggccaaagcctgatctaagcgttgaccgagttggttttcggacaccgttgcagtgagctgtactcgttgtgccatatatactgcttcttcgtttatcgttggggttttacggctttgccgtttaatatagtgtgctattgtagctggtcttaaccgggagcaggaacagagaatctcccgtattacattttgaggaaagtcaaaacgtcatgacgcgcatgaaatatctggtggcagccgccacactaagcctgtttttggcgggttgcagcgggagtaaggaagaagtacctgataatccgccaaatgaaatttacgcgactgcacaacaaaagctgcaggacggtaactggagacaggcaataacgcaactggaagcgttagataatcgctatccgtttggtccgtatagccagcaggtgcagctggatctcatctacgcctactataaaaacgccgatttgccgttagcacaggctgccatcgatcgttttattcgccttaacccgacccatccgaatatcgattatgtcatgtacatgcgtggcctgaccaatatggcgctggatgacagtgcgctgcaagggttctttggcgtcgatcgtagcgatcgcgatcctcaacatgcacgagctgcgtttagtgacttttccaaactggtgcgcggctatccgaacagtcagtacaccaccgatgccaccaaacgtctggtattcctgaaagatcgtctggcgaaatatgaatactccgtggccgagtactatacagaacgtggcgcatgggttgccgtcgttaaccgcgtagaaggcatgttgcgcgactacccggatacccaggctacgcgtgatgcgctgccgctgatggaaaatgcataccgtcagatgcagatgaatgcgcaagctgaaaaagtagcgaaaatcatcgccgcaaacagcagcaatacataacagaaacctgaaacacaaaacggcagcccttgagctgccgtttttttattctgtcagttgtgaaactgaagcgatttagtcgctatcgatctcatcaaatatggctcgctttgagatattcctcaagtaaaaaaacatctcttcctgcgatttctcacaaaaaagattcgttgacaaaaagtgacaaaattatgagattttcatcacacattttgacatcaggaacggtatgctgaattcaccaagacgggaagacaagaggtaaaatttatgacaatgaacattaccagcaaacaaatggaaattactccggccatccgccaacatgtcgcagaccgtctcgccaaactggaaaaatggcaaacacatctgattaatccacatatcattctgtccaaagagccacaagggtttgttgctgacgccacaatcaatacacctaacggcgttctggttgccagtggtaaacatgaagatatgtacaccgcaattaacgaattgatcaacaagctggaacggcagctcaataaactgcagcacaaaggcgaagcacgtcgtgccgcaacaagcgtgaaagacgccaacttcgtcgaagaagttgaagaagagtaatcctttatattgagtgtatcgccaacgcgccttcgggcgcgttttttgttgacagcgtgaaaacagtacgggtactgtactaaagtcacttaaggaaacaaacatgaaacacataccgtttttcttcgcattcttttttaccttcccctgaatgggaggcgtttcgtcgtgtgaaacagaatgcgaagacgaacaataaggcctcccaaatcggggggccttttttattgataacaaaaaggcaacactatgacaagcgaaaacccgttactggcgctgcgagagaaaatcagcgcgctggatgaaaaattattagcgttactggcagaacggcgcgaactggccgtcgaggtgggaaaagccaaactgctcagccatcgcccggtacgtgatattgatcgtgaacgcgatttgctggaaagattaattacgctcggtaaagcgcaccatctggacgcccattacattactcgcctgttccagctcatcattgaagattccgtattaactcagcaggctttgctccaacaacatctcaataaaattaatccgcacagtgcacgcatcgcttttctcggccccaaaggttcttattcccatcttgcggcgcgccagtatgctgcccgtcactttgagcaattcattgaaagtggctgcgccaaatttgccgatatttttaatcaggtggaaaccggccaggccgactatgccgtcgtaccgattgaaaataccagctccggtgccataaacgacgtttacgatctgctgcaacataccagcttgagcattgttggcgagatgacgttaactatcgaccattgtttgttggtctccggcactactgatttatccaccatcaatacggtctacagccatccgcagccattccagcaatgcagcaaattccttaatcgttatccgcactggaagattgaatataccgaaagtacgtctgcggcaatggaaaaggttgcacaggcaaaaagtccgcatgttgctgcgttgggaagcgaagctggcggcactttgtacggtttgcaggtactggagcgtattgaagcaaatcagcgacaaaacttcacccgatttgtggtgttggcgcgtaaagccattaacgtgtctgatcaggttccggcgaaaaccacgttgttaatggcgaccgggcaacaagccggtgcgctggttgaagcgttgctggtactgcgcaaccacaatctgattatgacccgtctggaaagtcgcccgattcacggtaatccatgggaagagatgttctatctggatattcaggccaatcttgaaagtgcggaaatgcaaaaagcattgaaagagttaggggaaatcacccgtagtatgaaggtattgggctgttacccaagtgagaacgtagtgcctgttgatccaacctgatgaaaaggtgccggatgatgtgaatcatccggcactggattattactggcgattgtcattcgcctgacgcaataacacgcggctttcactctgaaaacgctgtgcgtaatcgccgaaccagtgctccaccttgcggaaactgtcaataaacgcctgcttatcgccctgctccagcaactcaatcgcctcgccgaaacgcttatagtaacgtttgattaacgccagattacgctcactgctcataatgatgtcggcataaagctgcggatcctgagcaaacagtcgcccgaccatcgccagctcaaggcggtaaatcgggctagagagcgccagaagttgctcaagctgaacattttcttctgccaggtgcagcccgtaagcaaaagtagcaaagtggcgcagtgcctgaataaacgccatattctgatcgtgctcgacggcgctaatacgatgcagccgagcgccccagacctgaatttgctccagaaaccattggtatgcttccggtttacgtccatcacaccagaccacaacttgctttgccaggctaccgctgtccggaccgaacatcgggtgtagccccagcaccggaccatcatgcgccaccagcatggcctgtaatggcccatttttcacacttgccagatcgaccagaatacaatctttcggtaaaggcggtaatttgccaataacttgctcagtaacgtggattggcacactaacaatcaccattccggcatcggcaacaatatcagccgctcgatcccagtcatgttgctccagaatccgcacctgataaccgctgagggtcagcatcttctcgaacaggcgtcccatctgaccgccaccgccgacgataaccaccggacgcagactcggacaaagtgttttaaatcctttgtcgttttcactggagtaagattcacgcatcacccgacgcaaaacatcctcaatcagatctggcggtacacccagagcttccgcctctgcacgacggctggccaacatagatgcctcgcgctccggaacataaataggcagtccaaagcggcttttcacctcgcccacttcagcaaccagttccagacgcttcgctaataaattcagcagcgctttatcgacttcatcaatttgatcgcgtaatgcggtcaattcagcaaccataataaacctcttaagccacgcgagccgtcagctgcccgttcagatcctgatgaatttcacgcagcaaggcatcggtcatttcccagctaatgcaggcatcggttacggatacaccgtatttcatttcactgcgcggttgctcggaagactgattgccctcgtggatattactttcgatcatcagaccaataatactgcgattgccatctttgatttgagcaaccacggattctgccaccgcaggctgacggcgataatctttattggaattaccgtggctgcaatctaccatcagagacgggcgcagtcccgcctgttccatctctttttcacattgcgcaacatccgcagggctatagttcggcgctttaccaccgcgcaggatcacatggccgtccggattcccctgagtttgtagcaacgcaacctgccctgcctggttaatgccaacaaaacggtgcggctgggcggcggcgcgcatagcgttaattgctgttgccagactgccgtcggtgccgtttttaaaaccaaccggcatggaaagcccggaggccatttcacggtgagtttggctttccgttgtacgagcaccaattgcactccagctaaacagatcgcccaggtattgcgggctattcggatctaacgcttccgtcgccagtggcagtcccatattcaccagctcaagcagcaatttacgcgcgatctgcagcccggcttctacatcaaaagagccatccatatggggatcgttaattaaccctttccagccgacagtggtacggggtttttcaaaatagacgcgcattaccagatagaggctatcgctgacctctgcggcaagggctttaaatcgacgagcatattccagagcagtttccggatcatgaatggaacaaggaccacatactaccagcagacgaggatcgcgcccggcgataatatcactaatgcttttacggctgtcagcaatctgggcttcttgttgcaggctcaatggaaaagcggccttcagttgttccggagtcattaaaacctgttcgtcggtaatatgtacgttattcagcgcgtctttttgcatgatggcgatcctgtttatgctcgtttgcgatagttgatcctcagcgaggatgacgtaacgataacacataaagtaaagttttcaatccatatttcgtacatttttatttacacaggcaatttagtcgcgctttcaacccttacctctgtatagataaatttacactccctttgaaaacaatccgctatgctttgaaaaaggagaaagaaatgatgaaaaagtttatcgcccccttgttggctttactggttagcggatgtcagattgatccttatactcacgcgccaaccttgaccagcaccgactggtatgatgtcggtatggaagatgcgataagcggcagcgccataaaagatgacgatgcatttagcgatagtcaggcggatcgcggtctataccttaaaggatatgccgaaggacaaaagaaaacttgccagaccgattttacttatgcccgaggactttccggtaaaagctttcctgccagctgcaacaatgttgaaaatgccagccaactgcatgaagtaggcaaaaaggggctgatgaaaatgccagcacaatacgattaaattaattaaaaccccacaaataaattaaacataagattttactcattgtgttttatttctcacattgatgacggtcgcatgaaaaaatgatattttaatgagcattctgaaaaaatatcgatgcatttcgagcgaagatggtggggatccctgaatgcgtttttctcaccgactgttcttacttctgattctcctgctgacgggagcaccaatactcgctcaggagccttctgacgttgcgaaaaacgtgcgtatgatggtttccggtattgtcagttacacccgctggcctgcgctaagtgggccaccaaagttatgtatctttagttctagtcgttttagtaccgccctacaagagaatgccgcgacatctttgccttatctgcctgtcatcattcacactcaacaagaggcgatgattagtggctgcaatggtttttattttggcaacgagagtccgacattccagatggaattaaccgaacaatatccgagtaaggcgttattattaattgccgaacaaaataccgagtgcattattggtagcgccttttgtctgatcatccacaataatgacgtcagatttgccgtaaacctggatgccttaagccgtagcggtgtaaaggtcaacccggatgtcttaatgctcgcacggaagaaaaatgatggataacgataattctcttaataagcgccccacgtttaaaagagcattacgcaacatcagtatgaccagcatatttatcactatgatgctgatctggttgctgctttccgtgaccagcgtgctgaccctgaaacagtacgcgcaaaaaaacctggcactgacagcagcaacaatgacttacagtctggaagcagctgtcgtttttgccgatggccctgcagcaactgaaacactggcagcgctgggccagcaagggcaatttagtactgcagaagtacgtgataagcagcaaaatattctggcatcctggcattacacccgtaaggatccaggcgatactttcagtaatttcataagccactggctcttccctgcccccatcattcagccgattcgtcacaatggtgaaaccattggcgaagtacgcttaaccgctcgcgacagtagtatcagccattttatctggtttagcctcgccgtactgaccggttgtattctgctggcaagtggcatcgcaattaccctcacccgccatttgcacaatggcctggtagaagcgctgaaaaatatcaccgatgtcgtacatgatgtgcgttccaaccgcaatttttcccgacgagttagcgaagaacgtatcgctgagtttcaccgcttcgctctcgacttcaacagtctgctggatgaaatggaagagtggcagcttcgtttacaggctaaaaatgcgcagcttctacgtaccgcgctacatgacccattaaccgggctggctaaccgcgcagcgtttcgtagcggcatcaacacgttgatgaacaattccgatgcccgaaaaacgagcgcgttactatttcttgatggcgataatttcaaatacatcaatgatacctggggtcatgcgacgggcgatagagtcttgattgaaatcgcaaaacggttagctgaatttggcgggctgcgacataaagcataccgcctgggcggcgatgaattcgctatggtgctctatgatgtacagagcgaatctgaagtgcagcagatatgtagtgcactgacacaaatctttaatctcccgtttgatcttcataatggccatcagaccaccatgacattaagcattggttacgcgatgaccattgagcacgcctctgcggaaaaattacaagagcttgccgatcacaatatgtatcaggccaaacaccagcgtgccgaaaagctggtgagataacaaggatatatcgatatgataaagcacctggtagcacccctggttttcaccagtctaatactgactggctgccagtcccctcagggaaagtttactcctgagcaagtcgccgctatgcaatcttatggatttactgaatccgccggcgactggagcctgggcttaagtgatgccattctgttcgcaaaaaatgactacaaattgctcccggaaagccagcaacagatccaaaccatggcagctaaattggccagcacagggctaacacatgcccgtatggatggacacaccgataactatggtgaagacagttacaacgaaggcttaagtttgaaacgggcgaatgtcgtggccgatgcatgggctatgggtggacaaattccacgcagcaatctcaccacacagggtttaggaaaaaaatatcccatagccagtaacaagaccgcccagggccgcgccgagaaccgccgcgtcgcagtggtgattactaccccttaaaacaccagcaaacagataaaaaagggccagccaattggccagcccttcttaacaggatgtcgcttaagcgaaatcttagttaagacgctctttgatacgagcagccttaccagtacgctcacgcaggtagtacagtttagctttacgaacagcaccacgacgtttgacagaaatgctgtcaactaccggagagtgagtctggaagacacgctcaacgccttcgccgttggaaattttacgaacagtgaatgcagagtgcagaccgcggttacgaatagcgataaccacgccctcgaatgcctgcagacgttttttggaaccttcaacaacccatactttcacttccacggtatcacccggacggaaggaaggtacgtcctgcttcatctgctcttgttcaagttgcttaataatgttgctcataatttaatctcttatcctgggtaaactgatatctcgggggcttacgccatcccatcatgtttatgttgctgttgtgcgtgttccgttttgaactccgccagcaaccttgcttgctcttcagtcagagccaggttttccagaagttcaggtcttctaagccaggtacggcccaggctctgtttcaaacgccagcgacgtatctcggcatggttgccgctcagtaacactggcggaacttccatcccttctaacacctcaggccgcgtatagtgcgggcaatccagcaatccttcagcaaaggaatcttccgttgcgctggcttcatgtcccagtactcccggaataaaccgggaaacggagtcaatcagcgtcattgctggtaactcaccaccactgagaacgtaatcgccgatactccattcttcgtcaatttcggtttggatcacgcgctcatctataccttcgtagcgaccgcacaccagaatcaatttttgattcgttgccagttcgctgacgcccgcttgatcaagcttgcgtccctgtggactcagataaatcacctttgcgccttcacccgccgcggcttttgctgcatgaatggcgtcccgcaagggttgcaccatcattaacatccccggtccgccgccgtaaggacgatcgtccacggtacggtgccggtcatgcgtgaagtcgcgaggactccagctctggatgctcagcaggccatttttaactgcccggccagttaccccgtaatcggtaattgcgcggaacatttcaggaaacaggctaattatgccaatccacatagcgccgtcttttaccgtttatccggtggtttaaaaaccaggatcccaatctacttcgatactacgagtagtgagatcgactttcttgataacctgcccatcgaggaacggtacgagacgttccttgataccaaacgcatctttcaggtttgccttaatgacgagaacgtcattagatccggtttccatcatatcgacgactttaccgagatcgtagccttcagtggttactacctggcagcccatcaggtctttccagtagtagtccccctcttcaagctgaggcagctggctactatccacgacaatttcacaattcgtcagcaggttcgccgcatcacgatcgtcaacgcctttcagcttgatgatcatgtcctgattgtggtgcttccagctttccagctggacttgctgccactgacccgccttctggataaaccagggctgatagtcaaaaatgctttcggcgtcttcggtggaagaaaacactctgagccacccacgaataccgtaagagctacccatttttcccaaaacgatgggatcaacaggtgcttgcgcggtgagttgtttgctcatcatgaccaccgtgacagattaagctgctttgtttacttctttgatcagcgcagcaacgcgatcagaaatagttgcgccctggccaacccagtgagcgatgcgatccagatccaggcgagtgccttcttctttttcgctagcgattgggttgaagaaaccaacgcgctcgatgaagcgaccgttgcgtgcattacggctgtcagcgacaacaacctggtagaacggacgctttttagcgccgtgacgtgctaaacgaatagttaccataacatcctcttgtgtgaataaaacaaccggaccccatcgaggaacggagtccggtgtcatattaaaagcccgaaaattttactcatttttgcgggaattgcaatcaacagttgctaactctgctgtaaaaggccgtcggcggtgcagccagtttggtgccggagtgcgcgcagtcaccggagcgtacacgcagtacgtgaggatgacgagcacatcccggtgccaaaatggcaaacaagccaggccgattagcgaccagggaagcctgggggcatcatacccttcatgcttctcatcatcttcgccattccgcccttcttcattttcttcatcatgcgctgcatgtcgtcgaactgtttcagaagacggttaacgtcctgcacctgcataccgcaaccggcagcaatacggcgtttacggctacctttgatgatttctggcttagcgcgctctttcatcgtcatgctgttgatgatggcttccatacgcaccagcactttatcgtccatctgactcttgacgttatccgggatctgccccatgcccggcagcttgcccatcagactagccatgccgcccatatttttcatctggcgcagctgctcaagaaagtcgttgagatcgaagccgtcaccttttttcagcttgctggctaatttctctgcctgcgcgcggtcaactttgctttcgatatcttcgatcaggctcagtacgtcgcccatgccgagaatacggctcgcgatgcggtccggatggaacggctccagcgcctcagttttctcgccaacaccgaggaacttgatcggtttgccagtgatgtgacgaatagagagcgccgcaccgccgcgggcatcgccgtccactttggtcaacactacgccggtaagcggtaacgcttcattgaatgcttttgccgtattggccgcatcctgaccggtcatggcgtcaaccacaaacagggtttcaaccgggttaatgctcgcatggacttgtttgatctcgtccatcatcgcttcgtcaacgtgcagacgaccagcggtatccaccagcagcacgtcgtagaatttcagtttggcttctttcagcgccgcgttaacgatatctaccggcttctgaccaacatcagaagggaagaaatcaacgcccacctgctctgccagcgtctcaagctgtttgattgccgccgggcgataaacgtcggcagaaaccaccagcactttcttcttgtgcttctcgcgcaggaacttaccgagtttaccaacgctggttgttttaccggcaccttgcaggcccgccatcagtacgaccgcaggcggttgcgcagccaggttcagggtctggttctcttcgcccatcgccgcaaccagttcgttacggactattttgacgaactcctgccccggcgtcaggctcttattaacttcatgaccaaccgctttctcttttacgcgattgataaactcacgcactaccggcagagctacgtccgcctccagcagcgccatgcgcacttcgcgcagcgtatcttttacgttgtcttcagtgaggcgtccacggccactgatattgcgcagcgtgcggctcaaacgatcggttaaattatcaaacattgtctctcgcctggggtggaaacggttggccgcaatcgcgacacatcatcagtattttgccgcagtataacatgaaggcgtctttgttgttatgcaacggttggagcagcgtagtcctgacgctatactgcttctctttcttattgctcaaactgtcgacatcactatgcccgtttttgctctgctcgcgcttgtcgcctactccgtcagtcttgcgctgattgttcccggtctgctgcaaaaaaacggcggctggcggcgcatggctattatttctgcggtcattgcgctggtctgccacgcaatcgctctggaagcccgcatcctgcccgacggtgatagcggacaaaacctcagcctgctgaacgttggtagtttggtcagtttgatgatctgtacggtaatgaccattgtggcttctcgcaatcgtggctggctgctgctacccattgtctatgcctttgcgcttatcaacctggcgctggcaaccttcatgcccaatgaatacatcacccatctggaagctacgcctgggatgctggtgcacattggcttaagcctcttttcctatgccacgctaattatcgccgccctgtacgcgctgcaactggcgtggattgattaccaactgaagaacaagaagctggcgtttaaccaggaaatgccgccattgatgagtatcgagcgtaaaatgttccacatcacgcagattggcgtggtgctgctaacgctcacgctttgcactggcctgttctacatgcacaacttatttagcatggaaaatatcgacaaggctgtgctctctatcgtggcgtggtttgtctatattgtgctgctgtggggacattatcatgaaggatggcgtggacgccgcgtcgtctggtttaacgttgcgggcgcggtaattctgacactggcctacttcggcagccgaattgtccagcagttaatcagctaaacccagaaaaggagtttcccctggaacacatttctactactacgttgatcattattctgatcatcatggtggtcatttcagcctatttttccgggtccgaaaccggaatgatgaccctcaaccgctatcgtctgcgacatatggcgaaacagggtaatcgcagcgccaaacgcgtcgaaaaattgctgcgtaagccagaccgcctgataagcctggtgttaatcggcaataacctggtcaatattcttgcctccgcgctcggcactattgttgggatgcgtttgtacggcgatgcgggcgtggcaattgcgactggtgtgctgacttttgtcgtactggtatttgctgaggtattgccgaaaaccattgccgcgctgtacccggaaaaagtcgcttatccgagtagttttctgctggctccgctgcaaattttgatgatgccgctggtctggttgctgaatgctatcacccgtatgctgatgcgcatgatgggtatcaaaaccgatatcgtggttagcggctctttgagcaaagaagagttgcgcactatcgtgcacgaaagtcgcagtcaaatttcccgtcgcaatcaggatatgctgctgagcgtgctcgatctggaaaaaatgaccgttgatgacatcatggtgccgcgcagtgaaattatcggtattgatatcaacgatgactggaaaagcattctgcgccaactctcccacagtcctcacgggcgcatcgtgctctaccgtgatagcctggacgacgccatcagtatgctgcgagtacgtgaagcctggcggttgatgagcgagaaaaaagagttcaccaaagaaaccatgctgcgcgccgcggacgagatctattttgtgccggaaggtacgccgctcagcacgcagttggtaaagtttcagcgcaacaaaaagaaagtcggcctggtcgtcaacgagtatggagacattcaggggctggtgacggttgaagatattctggaagagattgtcggcgatttcactacgagcatgagcccaacacttgccgaagaggtcacgccgcaaaacgacggtagcgtgattatcgatggcaccgccaacgtgcgggaaatcaacaaagcctttaactggcatctaccggaagatgatgcccgcacggttaatggcgtcattcttgaggcactggaagagatccctgtcgcaggcacccgcgtgcgtattggcgagtacgatatcgatattctcgacgtacaggacaatatgattaagcaggtaaaagtttttcctgtgaaaccgctgcgcgagagtgtggcggagtaacgaaaacggcccggcattcgcatgcagggccgtgaattattacgaaagcagaaattaagcttttgctttcgctacagtaaccatcgccgcacgaatcgtacgaccattcagcgtataacccttctgcataatgcccagtacgttacctggcgcaacgtcatcagattccaccattgcgatggcctgatgcacattcgggtccagtgggacgttagtttcggcgatcacttcaacgccaaacttacgcacaacatccagcatgctcttcagcgtcagctcaatgccttcaaccatcgcagacatatccgggttagctttatcagccacttccagcgcacgatccaggctatcaatcaccggcagcaattcgttgatgaatttctccagcgcgaatttgtgggctttttcaatatccagttcagtacgacgacgcaggttttccatttcggcttttacacgcaaaatgccgtcacgttcacgggtctgggcttcagccagctgagcttcgagattcgcaactttttcatcgcgcggatccacctgctcagcagaagcttctggctcaactgcctcaatctcttcgtgctgatccatgataatttcttccggggcttgcccctcaggcgttttctgttctttactactcatgaatttctccgcgtttttttcgcattcatctcgctaacttcgcttattatggggatcagtttcagggtttcaagggaagcactcacattgtcatcaatcttcgcaacaaggacctcggaaaaatgaataatcatttcaagtgtattggcattgtgggacacccacggcaccccactgcactgacaacacatgaaatgctctaccgctggctgtgcacaaaaggttacgaggtcatcgttgagcaacaaatcgctcacgaactgcaactgaagaatgtgaaaactggcacgctcgcggagattgggcaactagctgatctcgcggtagtcgttggtggcgacggtaatatgctgggcgcggcacgcacactcgcccgttacgatattaaagttattggaatcaaccgtggcaacctgggtttcctgactgaccttgaccccgataacgcccagcaacagttagccgatgtgctggaaggccactacatcagcgagaaacgttttttgctggaagcgcaagtctgtcagcaagattgccagaaacgcatcagcaccgcgataaatgaagtggtgcttcatccaggcaaagtggcgcatatgattgagttcgaagtgtatatcgacgagatctttgcgttttctcagcgatctgatggactaattattagcacgccaacaggctccaccgcctattccctctctgcaggcggtcctattctgaccccctctctggatgcgattaccctggtgcccatgttcccgcatacgttgagtgcacgaccactggtcataaacagcagcagcacgatccgtctgcgttttagccatcgccgtaacgacctggaaatcagttgcgacagccagatagcactgccgattcaggaaggtgaagatgtcctgattcgtcgctgtgattaccatctgaatctgattcatccgaaagattacagttatttcaacacattaagcaccaagctcggctggagtaaaaaattattctaattttacgccagcctctttactgtatataaaaccagtttatactgtacacaataacagtaatggtttttcatacaggaaaacgactatgttggcacaactgaccatcagcaactttgctatcgttcgtgagcttgagattgattttcatagcggcatgaccgtaataactggcgagaccggcgcgggtaaatctattgcaatagatgccctcggtctttgtctcggtggtcgcgctgaagccgacatggtgcgtaccggcgctgctcgcgctgacctgtgcgcccgtttttctctgaaagatacgccagcggctctgcgctggctggaagaaaaccagcttgaagacgggcatgaatgtttgcttcgtcgcgtgatcagcagcgatggtcgctcccgtggtttcatcaacggtacagctgttcctctgagtcaactgcgcgaactgggtcagttgctgattcagatccatggtcagcacgctcatcaattactcaccaaacctgagcaccaaaaattcctgcttgatggctatgccaatgaaacctctctactgcaggaaatgaccgcacgttatcagttgtggcatcaaagctgccgtgacctcgcgcatcatcaacagttaagtcaggaacgcgccgcccgtgcggaactgctgcaataccaattaaaagaacttaacgaatttaatccgcagcccggagagtttgaacaaatcgacgaagagtacaaacgtctggcgaacagcggtcaattgctgaccaccagccagaatgcattggcattaatggccgacggtgaagacgcaaacctgcaaagtcagctttacacggctaaacaactggtgagcgaattgattggcatggacagcaaactgtccggcgtacttgatatgctggaagaagctaccatccagattgctgaagccagcgatgaactgcgccactactgcgatcgtctggatctcgatcccaaccgactatttgaacttgaacagcgcatcagtaaacagattagcctggcacgtaaacatcacgtcagccctgaggcattgccacagtattaccagagcctactggaagaacagcagcaactggacgatcaggccgacagtcaagaaacgcttgcgctggcggtaacgaaacatcatcagcaggcactggaaatcgcgcgcgcattacaccaacaacgccagcaatatgcagaagaacttgcacagctgatcaccgacagtatgcatgcgctcagtatgccgcatgggcagtttacgatcgatgttaaatttgacgagcatcacctgggcgctgacggtgccgatcgtattgagtttcgggtaaccaccaacccaggtcagccaatgcagcctattgccaaagtcgcatccggtggtgaattgtcccgcatcgcactggcaatccaggtcatcacggcgcgtaaaatggaaaccccggcactgatttttgatgaagtggatgtagggattagcggtccaacagcggcagttgtcggcaaactgctgcgtcaactcggcgaaagtactcaggtgatgtgtgttacccacctgccacaagtcgcgggatgtggtcatcaacactattttgtcagcaaagaaaccgatggtgcgatgacagaaacgcatatgcaatccctgaataaaaaagcgcggttacaagagctggcgcgcctgcttggtggcagtgaagtcacacgtaatacactggcgaatgcgaaagaactgcttgcagcgtaaacttttttcctgcttcacggtcagagtaaacagcaaaacgccgtaagaccggaaagcaaaaggttttaaagtgatgaaaggtctattatcatcggcatattacagatgagccacgtactgctcgggcccgaaaaggaatcaaatcactatgcgctgtaaaacgctgactgctgcagcagcagtactattgatgttgaccgcaggctgttccactctggagcgagtggtttaccgtcctgacatcaaccaggggaactatctgaccgctaacgacgtatccaaaatacgtgttggcatgacgcaacaacaagttgcgtacgcattgggtacaccgctgatgtccgatccatttggtacgaatacctggttctatgtcttccgccagcaaccaggtcatgaaggtgtaactcagcaaacgctgacgctgacctttaacagtagcggtgtgttgaccaatattgataacaaacctgcgctgagtggtaactaataataaagttgctctcaaagacgttaaaaaaggtgctcaatgagcaccttttttctgtctgttatttattcgcacttttttctgctcgttgcctgcgaagctctttcggatcggcaatgagagggcgataaatctccacccgatcgccatcatgcacactatcgcttagttttgccggacggctgtaaatgccgactttgtttttagttaaatcgatatcggtacgcaattccagcaagccactggcgcgaatagcttcttcaaccgtcgcgccctcctgcagcgtcactcgctgcaggtactgcttctcaggtagcgcataagccacctcaacggcaattttacctggcactgtaaacctctttcgcacgaaccgtaaaagcctggaccatattagccgccagctctttaaacacgcgaccaaaggcgagttcaatcaacttattggtaaactcaaagtcgagatgaaactcgatacgacacgcctcctggctcagcggcgtaaacttccatccaccaatcaatttcttgaacggcccatccaccagattcataagaatactttggttactggtcaactggttgcgggtagtaaacgttttgctgatcccagccttagagacatctaccgccgcagtcatctgcccaggagtggactccagaatccgacttccggtacaacccggcaaaaactgaggataagactgaacgtcattcactaactgatacatttgctccgcgctgtagggtaccagtgcggtccggctaatctgaggcataacaatttccatcaacaaaaatccaacaaataatatcatttatcctgctgtaaaaaaaacgctatcccggcgctgggtaacatcgggttcatgctaagatagagccttgtcccccgcaggattgatatggggtgttttcgatttcagattaccgatgattcacgacgcttatgacgaagaaaaaagcacataaacctggtagtgcgaccatcgcgcttaacaagcgcgcccgtcacgaatactttatcgaagaagagttcgaagcgggacttgccctgcaaggctgggaagttaaatccctgcgcgcaggaaaagccaatatcagcgacagctacgtccttctgcgtgacggagaggcatttctgtttggcgctaacatcacgccaatggccgtggcctccacgcatgtggtgtgcgatcctacccgtacccgcaagttacttctcaaccagcgcgaactggacagtttgtacggtcgcgtcaatcgagaaggctataccgtagtggcgctctccctgtactggaaaaatgcctggtgcaaagtgaaaatcggcgtcgccaaaggtaagaaacagcacgataaacgtagtgatatcaaagagcgcgaatggcaggtggataaagcacgtatcatgaaaaacgcccaccgttaaacctgcactccaattattgaccagttcctcaccgcgcctccctctccggcggcgcgaatgaacatcttattggctatcacatccgacacaaatgttgccatcccattgcttaatcgaataaaaatcaggctacatgggtgctaaatctttaacgataacgccattgaggctggtcatggcgctcataaatctggtatacttacctttacacattggggctgattctggattcgacgggatttgcgaaacccaaggtgcatgccgaggggcggttggcctcgtaaaaagccgcaaaaaatagtcgcaaacgacgaaaactacgctttagcagcttaataacctgcttagagccctctctccctagcctccgctcttaggacggggatcaagagaggtcaaacccaaaagagatcgcgtggaagccctgcctggggttgaagcgttaaaacttaatcaggctagtttgttagtggcgtgtccgtccgcagctggcaagcgaatgtaaagactgactaagcatgtagtaccgaggatgtaggaatttcggacgcgggttcaactcccgccagctccaccaaaattctccatcggtgattaccagagtcatccgatgaagtcctaagagcccgcacggcgcaagccctgcgggcttttttgtgccctcaatttgtcccgcgaagtccgaagagaactaattaaatccgaaccttttaggcccattgataggcccaacgaaaagctctattgtttacgttgggctaaacgcagggagactccccacctttgaaaacaggatgtagcgatgaaacttaacgacagtaacttattccgccagcaggcgttgattaacggggaatggctggacgccaacaatggtgaagccatcgacgtcaccaatccggcgaacggcgacaagctgggtagcgtgccgaaaatgggcgcggatgaaacccgcgccgctatcgacgccgccaaccgcgccctgcccgcctggcgcgcgctcaccgccaaagaacgcgccaccattctgcgcaactggttcaatttgatgatggagcatcaggacgatttagcgcgcctgatgaccctcgaacagggtaaaccactggccgaagcgaaaggcgaaatcagctacgccgcctcctttattgagtggtttgccgaagaaggcaaacgcatttatggcgacaccattcctggtcatcaggccgataaacgcctgattgttatcaagcagccgattggcgtcaccgcggctatcacgccgtggaacttcccggcggcgatgattacccgcaaagccggtccggcgctggcagcaggctgcaccatggtgctgaagcccgccagtcagacgccgttctctgcgctggcgctggcggagctggcgatccgcgcgggcgttccggctggggtatttaacgtggtcaccggtagcgcgggcgcggtcggtaacgaactgaccagtaacccgctggtgcgcaaactgagctttaccggtagcaccgaaattggccgccagttaatggaacagtgcgcgaaagacatcaagaaagtgagcctggagctgggcggtaacgcgccgtttatcgtctttgacgatgccgacctcgacaaagccgtggaaggcgcgctggccagcaaattccgcaacgccgggcaaacctgcgtctgcgccaaccgcctgtatgtgcaggacggcgtgtatgaccgttttgccgaaaaattgcagcaggcagtgagcaaactgcacatcggcgacgggctggataacggcgtcaccatcgggccgctgatcgatgaaaaagcggtagcaaaagtggaagagcatattgccgatgcgctggagaaaggcgcgcgcgtggtttgcggcggtaaagcgcacgaacgcggcggcaacttcttccagccgaccattctggtggacgttccggccaacgccaaagtgagcaaagaagagacgttcggccccctcgccccgctgttccgctttaaagatgaagctgatgtgattgcgcaagccaatgacaccgagtttggccttgccgcctatttctacgcccgtgatttaagccgcgtcttccgcgtgggcgaagcgctggagtacggcatcgtcggcatcaataccggcattatttccaatgaagtggccccgttcggcggcatcaaagccagcggtctgggtcgtgaaggtagcaagtatggcatcgaagattacttagaaatcaaatatatgtgcatcggtctttaactggagaatgcgaatgaacagcaataaagagttaatgcagcgccgcagtcaggcgattccccgtggcgttgggcaaattcacccgattttcgctgaccgcgcggaaaactgccgggtgtgggacgttgaaggccgtgagtatcttgatttcgcgggcgggattgcggtgctcaataccgggcacctgcatccgaaggtggtggccgcggtggaagcgcagttgaaaaaactgagccacacctgcttccaggtgctggcttacgagccgtatctggagctgtgcgagattatgaatcagaaggtgccgggcgatttcgccaagaaaacgctgctggttacgaccggttccgaagcggtggaaaacgcggtaaaaatcgcccgcgccgccaccaaacgtagcggcaccatcgcttttagcggcgcgtatcacgggcgcacgcattacacgctggcgctgaccggcaaggtgaatccgtactctgcgggcatggggctgatgccgggtcatgtttatcgcgcgctttatccttgcccgctgcacggcataagcgaggatgacgctatcgccagcatccaccggatcttcaaaaatgatgccgcgccggaagatatcgccgccatcgtgattgagccggttcagggcgaaggcggtttctacgccagcagcccagcctttatgcagcgtttacgcgctctgtgtgacgagcacgggatcatgctgattgccgatgaagtgcagagcggcgcggggcgtaccggcacgctgtttgcgatggagcagatgggcgttgcgccggatcttaccacctttgcgaaaagcatcgcgggcggcttcccgctggcgggcgtcaccgggcgcgcggaagtaatggatgccgtcgctccaggcggtctgggcggcacctatgcgggtaacccgattgcctgcgtggctgcgctggaagtgttgaaggtgtttgagcaggaaaatctgctgcaaaaagccaacgatctggggcagaagttgaaagacggattgctggcgatagccgaaaaacacccggagatcggcgacgtacgcgggctgggggcgatgatcgccattgagctgtttgaagacggcgatcacaacaagccggacgccaaactcaccgccgagatcgtggctcgcgcccgcgataaaggcctgattcttctctcctgcggcccgtattacaacgtgctgcgcatccttgtaccgctcaccattgaagacgctcagatccgtcagggtctggagatcatcagccagtgttttgatgaggcgaagcagtaacgccgctcctatgccggaggcgacgctgcgcgtcttgtccggcctacggggatccaggtcggataaggcgtttacgccgcatccgacaatctgtacgtgaacaggaagaaatctatgttggccgggtaaggcggagccgctctccggcaaaaagaatcaataacaattatacgcgtgacccggcgcgggaaatgtcggggcgctctcccaagtgacacactttcgagaggattcaggatggggcaaagtagccaaccacatgagttaggcggcgggctgaagagtcgccacgtcaccatgttgtctattgccggtgttatcggcgcaagtctgtttgtcggttccagcgtcgccatcgccgaagcgggcccggcggtattactggcctatctgttcgccgggctactggtggttatgattatgcggatgttggcggaaatggcggttgccacgcccgataccggtagcttttccacctatgccgataaagccattggtcgctgggcgggctataccatcggctggttgtactggtggttttgggtactggttatcccgctggaagccaacatcgccgccatgatcctgcacagttgggttccaggcattcccatctggttattttccctcgtcattaccctcgccttaactggcagtaacttattaagcgttaaaaactacggcgaatttgagttctggctggcgctgtgcaaagtcatcgctatcctggcctttattttccttggtgcagtcgcaattagcggtttttacccgtatgccgaagtgagcgggatcagtagattgtgggatagcggcggctttatgcccaacggtttcggtgcggtattaagcgcgatgttgatcaccatgttcagctttatgggcgcagaaattgtcaccattgccgccgcggaatccgacacgccggaaaaacatattgtccgcgccaccaacagcgttatctggcgtatttctatcttctatttatgttctatttttgtcgtcgtggcattaattccgtggaatatgcccggactaaaagccgtcggttcttatcgcagcgtactggaattgctcaatattccccatgcgaaattaatcatggactgcgtgatattactttccgtaaccagttgcctgaacagcgcgctgtataccgcgagtaggatgctctactccttaagtcgtcgcggtgatgctcccgcggtaatgggtaaaatcaaccgcagtaaaaccccgtacgtggcggtgttactctccaccggcgcggcattcttaacggtggtggtgaactattacgcgcctgcgaaggtatttaaatttctgatcgacagctccggcgctatcgccctgctggtttatttagtcatcgccgttagtcagttgcggatgcgcaaaattctgcgagcagaaggaagcgaaattcgcttgcgaatgtggctttatccgtggctcacctggctagtcatcggctttattacctttgtgttggtagtgatgctattccgtccggcgcaacagttagaagtgatctccaccggcttattagcgatagggattatctgtaccgtgccaattatggctcgctggaaaaagctggtattgtggcaaaaaacacccgttcataatacgcgctgatcatgatcaggagtcacaccatgaccattacgtctctggatggctatcgctggctgaagaacgatattattcgcggtaattttcaaccggatgaaaaattacgaatgagtttgctgacaagccgttatgcacttggcgttgggccgttacgggaagctcttagccaactggtggcggaacggctggtcacggtggtgaatcaaaaagggtatcgggtggcgtctatgagtgagcaggagctgctcgatattttcgacgcccgcgccaatatggaagcgatgttagtgagtctggcgattgcccgcggtggcgatgagtgggaggcagacgttctcgcaaaagcgcatctgctgagtaagcttgaggcctgtgacgccagcgagaaaatgcttgatgagtgggatctgcgtcatcaggcgtttcatacggcaattgtggcgggctgtggttctcactatttgctgcaaatgcgtgaacggttgtttgatctggcggcgcgttatcgatttatctggctgcggcgaacggtgcttagcgtggaaatgctggaggataaacacgatcagcaccagaccctgactgcggcggtactggcgcgagataccgcgcgcgccagtgagttaatgcgccagcatttactgacgccaattcccattatccagcaggcgatggctggcaattaattactcttccggaatacgcaacacttgccccggataaattttatccgggctttttagcatcggtttattcgcttcgaagattttattgtacagattagcgttaccgtagacctgtttggaaatggcactcagagtgtcgccagacttaacggtataaaactggctggcagtggctggtgtcgccgttttcacctgatcatcgacactggcaataccggaaatattccccaccgcaacaaggattttctccttcgcctcctgactcaggccgtcaccagtgaccgtcgctttgccgtcggcaatttgaatattcactttatcggcatccggtataccggttttgttcagatgctcctgcaccttcttcgcctgatcgtctttatcgtgctgacctgtaaccgcgtcccagagtttttctccggcatctttcacaaaattgaacagacccatagctacctcattcgttaacggaaacactcagaaagtgtagcagaggaacgcggcgcgttaacgccgcggggatgagcacaggtttaatcgcgggtttgcacccagaacgcgtgaatcaaaccggggatatacccaagcagtgtcaacagaatattaataatgaacgcccaaccgaaccctttaccgagcagcacgccgagcggcggcagaatgatggtgatgacgattctccagaaacccatatgtactccctataagaaaattactcattgtttaaaaagagattttatctcttaagcgtagtaattttagcggagcctgccagtttcagcttacgcttttactctcatttacgctgctgaggctggtatatgttgcatttttagtttagagtttacttaatttagaaaatacttaaataaatatgactgaactcgcgcaattacaggccagtgccgaacaggcagcggccttattgaaagcaatgagccaccctaaacgattgctgattctgtgcatgcttagcggttcccccggcaccagcgcgggagagctgacgcgcattaccggactgagtgcctctgcgacaagtcagcatctcgctcgtatgcgggacgaagggcttatcgacagccaacgggatgcccaacgcattctatattccattaaaaatgaggcggtaaatgccattatcgccaccctgaaaaatgtctattgtccgtaaggagtcactatggctttgacaaccattagcccgcatgatgcacaagaattaatcgcacgcggcgcaaagttaatcgatattcgtgatgctgatgaatatcttcgtgaacatattcctgaagcagatctggctccattatccgtgctggaacagagtggtcttccggctaaattacgtcacgagcaaattatattccactgccaggcaggtaaacgcaccagtaataatgccgataaattagcagcgattgccgcccccgcagaaatctttttactcgaagatgggattgatggctggaaaaaagcaggattgccagtagcggtaaataaatctcaacccttgccgttaatgcgccaggtgcagatcgctgcgggtggtttaatattaatcggcgttgtactgggttataccgtaaatagcggtttcttcttattaagtggctttgttggtgccgggttactgtttgcaggaatcagcggtttttgtggaatggcaaggttgttagataagatgccgtggaaccaacgagcttgagaagcgacgccggacgcgccctagcagcgacatccggcctcagtaattagatcaggaaatcgtcgagagatttaccttctgccagcgcctgagcaattggcttcggtgtacggccctgaccggtccaggttttagtttcaccgttaacatcggtgaatttatatttcgccggacgcggctggcgttttttaccagcgcgtggtgcagcagcagagctattacccaataactcttccgggttaattccgtcagctttcatcagctccagccaggtgctaattttttcctggcgctctgccagttcacgctgctgctgttcttcttcttcacgtctttctttagtgacaaccctgaatttttcgagcatttcttcaagaacgtcaatggagaattcgcgagccatcgcacggagggtgcgaatgttatttaaactttgtaacattacggacataataaagaaaaccttttaacgccaaaacaaaaaaagtatttcgtcgcgtagtgtaagcgatcacttattatatttccacaaaatttaatctatttacagtcctgcgcgagattatttcagctgttattttctgaaactctcagaataatttcaagattatatattagccattttgatgagtaatttagattattggtgaacagagcggcgctctctgctcgctaattccgcaagcctgacaaaatcaaagtgaataaaaatgcaatataacagaataaaagaaaacatccatcactggtgctttctgctgttaatgtacattgtctggcataaaaaatgctgaaaatgacccagctactacatacaccgaattctctacgcttatagcgttacctcacccccaaactttcattagtgatattaaaggtaaggccatatctaattgatttaattaaaaataaatcatatcggcatgtaaaaatccacaatgtacaaaaaacgagccgttacggaatattttatctacaaaaactgactaaataaaaatttttcactaattgattagtcatagccagcgatatacgctatgcgaaaatgcagatggcaatgagatccactgctttcatctccattaacatcccattacgcttttattaaggagcattagcatgttcagtccgcagagtcgcttgcgtcatgcagttgcagatacgttcgcgatggttgtttactgttctgtcgtgaacatgtgtattgaagttttcctctccggaatgagcttcgaacagtctttttattccagattggtagcgattccggtgaacatcttaattgcatggccatacggtatgtaccgtgatctgtttatgcgcgcggcacgcaaagttagcccgagcggctggataaaaaatctggcggatatcctggcttatgtgacgttccagagtccggtgtatgtggcgatcttgttagtggtgggcgcagactggcatcagattatggcggcggtcagtagtaacatcgttgttagcatgttgatgggggcggtttatggctacttcctcgattattgccgccgactgtttaaagtcagccgttaccagcaggtaaaagcctgactcttcttttcgcgactggcatcgccagtcgcgtctttaactggcttcgccaaataaaccattcaaataacgttcaagcgcaacacggctactaaagccatgcgggataccgtaatgctcgtgtcgctcgcctgctaaatagagcggaaattgctggtaatgatcgcaagttttaatatcggaagcgggttcagccagtgtgctactgcgttcttttaatgttggatgaattaccagagcggtacgtcccattcgcgcttcgcgattaacatagacataattttccccacggcggtaaccatacgctttctgggttaccacatcgacagtaaaaccgactttttcaagtacgcgcgccacctcgtctggtcgtaaatacatatttgatcctcgttattatcaaccgcgggcctaccttacctgattgcgcattcacaacgctttcagaaaagtccataaagccgcgatgaacctcagttaagaaaattatggtctacactgaaaattacatcgaattctaatgggggatcatatgtttaaccgaccgaaccgcaacgacgttgatgatggcgtgcaggatatccagaatgatgtcaatcaattagctgacagcctcgaatctgtattgaagtcctggggcagcgacgccaaaggggaagctgaagccgcacgcagtaaagctcaggcattgctgaaagaaaccagggcgcgaatgcatggtcgtactcgcgtccagcaagccgcgcgcgatgccgttggctgcgcggattcttttgttcgtgaaagaccctggtgtagcgtgggtacagcagctgcggtaggtatttttatcggcgcactgttaagcatgcgcaaaagctaatgcaaaaatgataataaatacgcgtctttgaccccgaagcctgtcttcggggtttctttttgcctggtgaatcacaaaaatccccctaccccgtcacgctcatatccagggtaatttcgaccactatttgctatatattgtgtggttgaatcttttttcaactacatctagtatctctgtatcaacagagagacaacccgacgcgtatcatcgcgccgtatcttcattttaaacggaaatacgaatcatgcgcattactatttacactcgtaacgattgcgttcagtgccacgccaccaaacgggcgatggaaaaccggggctttgattttgaaatgattaatgtcgatcgcgttcctgaagcggcagaagcgttgcgtgctcagggctttcgtcagttgccggtagtgattgctggcgatcttagctggtctggtttccgtccggacatgattaaccgtctgcatccagcgccacacgcggccagtgcatgagccagctcgtctacttctccagcagctccgaaaacacgcagcgttttatcgaacgtttaggtctgcccgcggtgcgcatcccgctcaatgagcgggaacggattcaggtagacgagccttacatcctgatcgtgccctcttacggcggcggcggtacggctggcgcggtgccacgacaggtaattcgctttttaaacgacgagcacaaccgggcgttgcttcgcggcgttattgcttctggtaatcgcaactttggtgaggcgtatggccgcgccggagatgtgattgcccggaaatgcggcgtgccgtggctgtaccgttttgaactcatgggtacgcaaagcgatatcgaaaacgttcgtaaaggagtaaccgaattttggcaacgacaaccgcagaatgcctgacgcaggaaacgatggattaccacgcgctgaatgcgatgcttaacctctacgatagcgcaggtcgcattcagttcgataaagaccgccaggccgttgacgcctttattgcgacgcatgtgcgtccgaacagtgtgaccttcagtagccagcagcagcgcctgaactggctggtcaacgaaggttactatgatgaaagcgttcttaatcgctactctcgcgactttgtcattacgctgtttacccacgcacacaccagcggttttcgtttccagacattcctcggggcatggaagttttacaccagctatacgttgaagacattcgacggtaaacgttatctggaagattttgccgatcgagtaacgatggtggcgctgacgctggcacaaggcgatgagacgctggcgttgcaactgaccgatgaaatgctgagtggacgctttcagccagccacgccaacattcctcaactgcggtaagcagcagcgcggcgaactggtttcctgttttttgctgcgtattgaagacaatatggagagcattggtcgggcggtaaattccgcactgcagctgagcaaacgcggcggcggcgtagcatttttgctgagcaatctgcgagaagcgggcgcgccaattaaacgtattgaaaatcaatcttctggcgtaattccggtgatgaaaatgctggaagacgcattttcctatgccaaccaactcggcgctcgtcagggggctggtgcagtctatttacatgctcatcatcccgatattctgcgttttctcgacacgaaacgggaaaatgccgacgaaaaaatccgcattaaaacactgagccttggcgtggtgatcccggatatcactttccatctggcaaaagagaatgcgcagatggcgctgtttagcccttatgacgtagagcgagtttatggcaagccgtttgccgatgtggccatcagccaacactatgacgaactggttgccgatgaacgcattcgcaaaaaatacctcaacgcccgtgatttcttccagcgactggcagaaatccagtttgagtccggctatccctacatcatgtatgaagacacggtaaaccgtgctaaccctatcgccgggcgcataaatatgagtaatctctgcagtgaaattttgcaggttaacagcgccagtgagtatgacgagaatctcgactatacccgcacaggccatgatatttcctgcaatttaggtagcttgaatattgcgcacaccatggattcccccgattttgcccgcacggtagagactgccgtgcgcggtttaacggcagtaagtgatatgagtcatatccgcagcgtgccgtccatcgaagccggaaatgccgccagccacgccatcggactggggcagatgaatttacacggctatctggcgcgagaaggcatcgcttatggtagcccggaagcactggatttcaccaatctctatttctatgccatcacctggcatgcactgcgtaccagcatgttgctggcacgcgaacgcggtgaaaccttcgccgggttcaaacagagtcgctatgccagtggtgaatattttagccaatatctgcaagggaactggcagccgaaaacggcgaaagttggcgaactgtttacccgtagcggtattacgttacctacccgtgagatgtgggcgcagctgcgcgacgacgtgatgcgctacggcatatacaaccagaatcttcaggcggtgccgccaaccggttctatctcttatatcaaccatgctacgagcagtattcatccgattgtggcgaaagtagagatacgcaaagagggcaaaacaggacgcgtttactaccctgccccgtttatgactaacgagaatctggcgctgtatcaggacgcttacgaaattggcgcagaaaagatcatcgacacctacgcggaagcgactcgccatgtcgatcaggggctgagcctgacgctttttttccccgataccgccaccactcgcgatatcaacaaagcgcagatttacgcctggcgcaagggtatcaaaacgctctattacatccgcctgcgtcagatggcgctggaaggcactgaaattgaaggctgcgtctcctgtgcactttaaggaatatctatgaaactcagtcgtatcagcgccatcaactggaacaagatatctgacgataaagatctggaggtgtggaatcgcctgaccagcaatttctggctaccagaaaaggtgccgctgagcaacgatattcctgcctggcagacattaactgtcgtagaacaacaactgacgatgcgcgtttttactggcctgacgctgctcgacacgctgcaaaatgttatcggcgcgccttctctgatgcccgatgcactcacgcctcatgaagaagcggtattaagcaatatcagctttatggaagcggttcatgcccgctcttacagtagcattttcagcacgctatgccagaccaaagatgtcgatgccgcctacgcctggagtgaagaaaacgcaccgttgcagcgaaaagctcagattattcagcaacattatcgcggtgatgatccgctgaaaaagaaaatcgccagtgtgtttcttgaatcttttttgttctattccggtttctggctgccgatgtatttttccagccgcggaaagctgaccaataccgcggacctgatccgtctgattatccgcgatgaagcagtccacggttactacataggctataaatatcagaaaaacatggaaaagatatctctgggacaacgtgaagagttgaagagtttcgccttcgatttgttgctggaactctacgacaacgagttgcaatacaccgatgagctgtacgccgaaaccccgtgggctgacgatgtgaaagcgtttctctgttacaacgccaataaggctttgatgaatctgggctacgaaccgttatttcccgcagaaatggcggaagtgaatccggcaatcctcgccgcgcttagcccgaatgccgatgaaaatcacgatttcttttccggtagtggctcctcttatgtgatggggaaagcggttgaaacagaagatgaagactggaatttctgagggtgttattttcaaaaatatcactacccgcagcagggaaataattcccgccaaatagctttttatcacgcaaataatttgtggtgatctacactgatactctgttgcattattcgcctgaaaccacaatattcaggcgttttttcgctatctttgacaaaaaatatcaactttctcgatttgctctcagcccttatatcacgggaaattccggcgatttgctcgcatcaatattcatgccacatttgccatcaggggttgcctcagattctcagtatgttagggtagaaaaaagtgactatttccattgggtaatatatcgacatagacaaataaaggaatctttctattgcatggcaattaaattagaaattaaaaatctttataaaatatttggcgagcatccacagcgagcgttcaaatatatcgaacaaggacttagtaaagaacaaattctggaaaaaactgggctaagccttggcgtaaaagacgccagtctggccattgaagaaggcgagatatttgtcatcatgggattatccggcagcggtaaatccacaatggtacgccttctcaatcgcctgattgaacccacccgcgggcaagtgctgattgatggtgtggatattgccaaaatatccgacgccgaactccgtgaggtgcgcagaaaaaagattgcgatggtcttccagtcctttgccttaatgccgcatatgaccgtgctggacaatactgcgttcggtatggaattggccggaattaatgccgaagaacgccgggaaaaagcccttgatgcactgcgtcaggtcgggctggaaaattatgcccacagctacccggatgaactctctggcgggatgcgtcaacgtgtgggattagcccgcgcgttagcgattaatccggatatattattaatggacgaagccttcagcgcgctcgatccattaattcgcaccgagatgcaggatgagctggtaaaattacaggcgaaacatcagcgcaccattgtctttatttcccacgatcttgatgaagccatgcgtattggcgaccgaattgccattatgcaaaatggtgaagtggtacaggtcggcacaccggatgaaattctcaataatccggcgaatgattatgtccgtaccttcttccgtggcgttgatattagtcaggtattcagtgcgaaagatattgcccgccggacaccgaatggcttaattcgtaaaacccctggcttcggcccacgtagcgcactgaaattattgcaggatgaagatcgcgaatatggctacgttatcgaacgcggtaataagtttgtcggcgcagtctccatcgatagccttaaaaccgcgttaacgcagcagcaaggtcttgatgcggcgctgattgatgcgccgttagcagtcgatgcacaaacgcctcttagcgagttgctctctcatgtcggacaggcaccctgtgcggtgcccgtggtcgacgaggaccaacagtatgtcggcatcattagcaaaggaatgctgctgcgcgctttagatcgtgagggggtaaataatggctgatcaaaataatccgtgggataccacgccagcggcggacagtgccgcgcaatccgcagacgcctggggtacaccgacgactgcaccgactgacggcggtggtgctgactggctgaccagtacgcctgcgccaaacgtcgagcattttaatattctcgatccgttccataaaacgctgatcccgctcgacagttgggtcactgaagggatcgactgggtcgttacccatttccgtcccgtcttccagggcgtgcgcgttccggttgattatatcctcaacggtttccagcaattgctgctgggtatgcccgcaccggtggcgattatcgttttcgctctcatcgcctggcagatttccggggtcggaatgggtgtggcgacgctggttagcctgattgccatcggcgcaatcggtgcctggagccaggcaatggtgactctggcgctggtgttaaccgccctgctgttctgtatcgtcatcggtttgccgttggggatatggctggcgagaagtccgcgagcggcgaaaattattcgtccactgcttgatgccatgcagaccacgccagcgtttgtttatctggtgccaatcgtcatgctatttggtatcggtaacgtgccgggcgtggtggtgacgatcatctttgctctgccgccgattatccgtctgaccattctggggattaaccaggttccggcggatctgattgaagccagccgcagtttcggtgccagcccgcgccagatgctgttcaaagttcagttaccgctggcgatgccgaccattatggcgggcgttaaccagacgctgatgctggccctttctatggtggtcatcgccagcatgattgccgtcggcgggttgggtcagatggtacttcgcggtatcggtcgtctggatatggggcttgccaccgttggcggcgtcgggattgtgatcctcgccattatcctcgatcgtctgacgcaggccgttgggcgcgacagtcgcagtcgcggcaaccgtcgctggtacaccactggccctgttggtctgctgacccgcccattcattaagtaactctgcacttgcccggtgacgccgggcattatcaccctgccaaaaaaaggaataacaatgcgacatagcgtactttttgcgacagcgtttgccacgcttatctctacacaaacttttgctgccgatctgccgggcaaaggcattactgttaatccagttcagagcaccatcactgaagaaaccttccagacgctgctggtcagtcgtgcgctggagaaattaggttataccgtcaacaaacccagcgaagtagattacaacgttggctacaccagccttgcttccggcgatgcaaccttcaccgccgtgaactggacgccactgcatgacaacatgtacgaagctgccggtggcgataagaaattttatcgtgaaggggtatttgttaacggcgcggcacagggttacctgatcgataagaaaaccgccgaccagtacaaaatcaccaacatcgcacaactgaaagatccgaagatcgccaaactgttcgataccaacggcgacggaaaagcggatttaaccggttgtaaccctggctggggctgcgaaggtgcgatcaaccaccagcttgccgcgtatgaactgaccaacaccgtgacgcataatcaggggaactacgcagcgatgatggccgacaccatcagtcgctacaaagagggcaaaccggtgttttattacacctggacgccgtactgggtgagtaacgaactgaagccgggcaaagatgtcgtctggttgcaggtgccgttctccgcactgccgggcgataaaaacgccgataccaaactgccgaatggtgcgaattatggcttcccggtcagcaccatgcatatcgttgccaacaaagcctgggccgagaaaaacccggcagcagcgaaactgtttgccattatgcagttgccagtggcagatattaacgcccagaacgccattatgcatgacggcaaagccagtgaaggcgatattcagggacacgttgatggttggatcaaagcccaccagcagcagttcgatggctgggtgaatgaggcgctggcagcgcagaagtaatttttattcgggcggataaggcgtttttgccgcatccgccgttctgtgcacaatgcctgatgcgacgctggcgcgtcttatcatgcctacaaaccacatcgcacatttcaacaatctatctttcatcccatattcatcaacatccgctattattgatttccagcttaatcatcacctgatgaacaaaaataatgactaaacctaatcatgagcttagcccggcgctgatcgtgctgatgtctatcgccaccggtctggcggtagccagtaactattacgcccagccattgctcgacaccatcgcgcgtaacttttccctttccgccagtagcgcaggctttattgttaccgccgcgcagttgggctatgccgcaggtctactgtttcttgttcccctcggtgatatgtttgaacgccgccgcctgattgtcagcatgaccttactggcggcatgttgattaccgccagcagtcagtcgctggcgatgatgatcctcggtacggcattaaccggtttattcagtgtcgtggcacaaattctggttccgctggcagcgacgctggctagtccggataaacgcggcaaagtggttggcactattatgagcggtctgctgttggggatcttgctggcacggacagttgccggattgctggcgaatctcggcggctggcgcaccgtcttttgggttgctagcgtgttaatggcactgatggcgctggcattatggcgtggtctgccacaaatgaaaagtgaaacccacctcaactacccacagttgttgggttccgttttcagtatgtttatcagcgataaaattctgcgtacccgcgcgttgctgggctgcctgacctttgccaatttcagcattctctggaccagtatggcctttttgcttgccgctccaccttttaactacagcgatggtgtcattggtctgtttggacttgcgggagctgccggagcgttgggcgctcgtccggcgggcggttttgccgataagggcaaaagccaccacaccacaactttcggtctgctgctgctattacttagttggctggcgatctggtttggtcacacttccgtactggcgttgattatcggaatcctggtgctggatctcaccgtgcagggcgtgcatatcactaaccagacggtaatttatcggatacatcctgatgcgcgcaatcgcctgaccgcaggttacatgactagctactttattggcggtgccgccggtagcctaattagtgccagtgcctggcaacatggcggttgggctggcgtttgtctggctggcgcgacgattgccctggttaacttactggtctggtggcgaggttttcatcgtcaggaagccgcaaattaagcaatcagcaaccgttttcgtggctttacacttataagggtgttaagaagcccatcagtctgataaggttaagatattcattcagtctatttataatattaacaatcgttaagcgtacactctatggaaagccctactccacagcctgctcctggtagcgcgaccttcatggaaggatgcaaagacagtttaccgattgttattagttatattccggtggcctttgcgttcggtctgaatgcgacccgtctgggattctctcctctcgaaagcgtttttttctcctgcatcatttatgcaggcgcgagccagttcgtcattaccgcgatgctggcagccgggagtagtttgtggattgctgcactgaccgtcatggcaatggatgttcgccatgtgttgtatggcccgagtctgcgtagccgtattattcagcgtctgcaaaaaagcaaaaccgccctgtgggcgtttggcctgacggatgaggtttttgccgccgcaaccgcaaaactggtacgcaataatcgccgctggagcgagaactggatgatcggcattgccttcagtagttggagtagctgggtatttggtacggtaataggggcattctccggcagcggcttgctgcaaggttatcccgccgttgaagctgcattaggttttatgcttccggcactctttatgagtttcctgctcgcctctttccagcgcaaacaatctctttgcgttaccgcagcgttagttggtgcccttgcaggcgtaacgctattttctattcccgtcgccattctggcaggcattgtctgtggctgcctcactgcgttaatccaggcattctggcaaggagcgcccgatgagctatgaggttctgctgcttgggttactagttggcgtggcgaattattgcttccgctatttgccgctgcgcctgcgtgtgggtaatgcccgcccaaccaaacgtggcgcggtaggtattttgctcgacaccattggcatcgccagcatatgcgctctgctggttgtctctaccgcaccagaagtgatgcacgatacacgccgtttcgtgcccacgctggtcggcttcgcggtactgggtgccagtttctataaaacacgcagcattatcatcccaacactgcttagtgcgctggcctatgggctcgcctggaaagtgatggcgattatataacccacaagaatcatttttctaaaacaatacatttactttatttgtcactgtcgttactatatcggctgaaattaatgaggtcatacccaaatggatagtagctttacgcccattgaacaaatgctaaaatttcgcgccagccgccacgaagattttccttatcaggagatccttctgactcgtctttgcatgcacatgcaaagcaagctgctggagaaccgcaataaaatgctgaaggctcaggggattaacgagacgttgtttatggcgttgattacgctggagtctcaggaaaaccacagtattcagccttctgaattaagttgtgctcttggaagttcccgtaccaacgcgacgcgtattgccgatgaactggaaaaacgcggttggatcgaacgtcgtgaaagcgataacgatcgccgctgcctgcatctgcaattaacggaaaaaggtcacgagtttttgcgcgaggttttaccaccgcagcataactgcctgcatcaactctggtccgcgctcagcacaacagaaaaagatcagctcgagcaaatcacccgcaaattgctctcccgtctcgaccagatggaacaagacggtgtggttctcgaagcgatgagctaacgcgtcatctcgctcaaaaatccagatttataaaagaaaaaatgactggccagcatcgcaacatgctggcctttttggcaagcaggtcggctcagccgatgagttaagaagatcgtggagaacaatatgagcgcaaatgcggagactcaaaccccgcagcaaccggtaaagaagagcggcaaacgtaagcgtctgctcctccttctcaccttgctctttataattattgccgtagcgatagggatttattggtttttggtactgcgtcacttcgaagaaaccgatgacgcatacgtggcagggaatcaaattcaaattatgtctcaggtgtctggcagcgtgacgaaagtctgggccgataacaccgattttgtaaaagaaggcgacgtgctggtcactctcgacccgacagatgctcgccaggcgtttgaaaaagccaaaactgcactggcttccagcgttcgccaaacccaccagctgatgattaacagcaagcagttgcaggcgaatattgaggtgcagaaaatcgccctcgcgaaagcacaaagcgactacaaccgccgtgtgccgctgggcaatgccaacctgattggtcgcgaagagctgcaacacgcccgcgacgccgtcaccagtgcccaggcgcaactggacgtcgcgattcaacaatacaatgccaatcaggcgatgattctggggactaaactggaagatcagccagccgtgcaacaggctgccaccgaagtacgtaacgcctggctggcgctggagcgtactcgtattatcagtccgatgaccggttatgtctcccgccgcgcggtacagcctggggcgcaaattagcccaacgacgccgctgatggcggtcgttccagccaccaatatgtgggtggatgccaactttaaagagacgcagattgccaatatgcgtatcggtcagccggtcactatcaccacggatatttacggcgatgatgtgaaatacaccggtaaagtggttggtctggatatgggcacaggtagcgcgttcagtctgcttccagcgcaaaatgcgaccggtaactggatcaaagtcgttcagcgtctgcctgtgcgtatcgaactggaccagaaacagctggagcaatatccgctgcgtatcggtttgtccacgctggtgagcgtcaataccactaaccgtgacggtcaggtactggcaaataaagtacgttccactccggtagcggtaagcaccgcgcgtgaaatcagcctggcacctgtcaataaactgatcgacgatatcgtaaaagctaacgctggctaatccagaggtgcgtgtgatgcaacagcaaaaaccgctggaaggcgcgcaactggtcattatgacgattgcgctgagtctggcgacattcatgcaggtgctggactccaccattgctaacgtggcgatccccactatcgccgggaatctgggcagtagcctcagccagggaacgtgggtaatcacttctttcggggtggcgaatgccatcagcatcccgcttaccggctggctggcaaagcgcgtcggggaagtgaaactgttcctttggtccaccatcgcctttgctattgcgagctgggcgtgtggtgtctccagcagcctgaatatgctgatcttcttccgcgtgattcaggggattgtcgccgggccgttgatcccgcttagccaaagtctattgctgaataactacccgccagccaaacgcagcatcgcgctggcgttgtggagcatgacggtgattgtcgcgccaatttgcggcccgatcctcggcggttatatcagcgataattaccactggggctggatattcttcatcaacgtgccgattggcgtggcggtggtgttgatgacactgcaaactctgcgcggacgtgaaacccgcaccgaacggcggcggattgatgccgtggggctggcactgctggttattggtatcggcagcctgcagattatgctcgaccgcggtaaagagctggactggtttagtagtcaggaaattatcatccttaccgtggtggcggtggtggctatctgcttcctgattgtctgggagctgaccgacgataacccgatagtcgatctgagcttgtttaagagccgcaacttcaccatcggctgcttgtgtatcagcctcgcgtatatgctctacttcggcgctattgttctgctgccgcagttgttgcaggaggtctacggttacacggcgacctgggcaggtttggcctctgcgccggtagggattattccggtgatcctgagcccgattatcggccgcttcgcgcataaactggatatgcggcggctggtaaccttcagctttattatgtatgccgtctgcttctactggcgtgcctatacctttgaaccaggtatggattttggcgcgagcgcctggccgcagtttatccaggggtttgcggtggcctgcttctttatgccgctgaccaccattacgctgtctggtttgccaccggaacgactggcggcggcaagcagcctctctaactttacgcgaacgctggcggggtctatcggcacgagcataaccacgaccatgtggaccaaccgcgagagcatgcaccatgcgcagttgactgagagcgtaaacccgttcaacccgaatgcccaggcgatgtacagtcaactggaagggcttgggatgacgcaacagcaggcaagtggctggattgcccagcagatcaccaatcaggggctgattatttccgccaatgagatcttctggatgagtgccgggatattcctcgtcctgctggggctggtgtggtttgctaaaccgccatttggcgcaggtggcggcggaggcggtgcgcactaagtacaactaagccagttcatttgaactggcttttttcaattaattgtgaagatagtttactgattagatgtgcagttcctgcaacttctctttcggcagtgccagttcttcgttgctgttgatgcgtacgtcacgttccagaatgctacgcgcaatatcctgcgcttcctgcaagctgtgcatctggtaagtgccacactggtagacgttcagttccgggatctgattctgatcctgcactttcagcacgtcttccattgccgctttccaggcatcagcaacacgctgctcatctggcgtaccaatcagactcatataaaaaccggtgcggcagcccattgggctgatatcgataatctctacaccattaccgttaagatggttacgcataaaaccagcaaacaggtgctccagggtatggatccctctttctggcatcacttctttgttcggcacgcagaagcgcagatcgaacacggtgattgcgtcgccatgcggggtgttcattgttttcgccacccgaactgcaggcgcttccatccgggtatgatcgactgtgaagctatctaacaacggcatttagccacctccggtaatttttttaaaaattttctgaactctttcttcccaggcgagtctgagtatatgaaagacgcgcatttgttatcatcatccctgaattcagagatgaaattttggccactcacgagtggcctttttcttttctgtcaggcgtgtttttccagccacaccgcaaacggttcggtatcagcggcttccatttcctgctgacggcgttcagacgcctcgcgctcggctacaaaatcctcttcgcgcagaatttccagcggctcttcacgcagcagattacggtaggcttctgcaaatgctttgcctgttccgccaataccagtatcaatcatagaccttaagatacgggcagagaaagtcagatcgggattatcgaagcaggcaaccagttcatcacacactttctgatacgcttcgccgccgttaatactatccagcgtttgcgcgacgcgtttcagatcgcggaacagatctttacccacctgcggtaacgggaactgtgcggtttcgcagccgatacccagcgtcagacccggtttgcgaccttcgaggatcacccggttccagttaacgcgtgtacaggcaagttcgctactgctcatttccggtgcatcagccagcgcacaccagaccataaacaggtcgaggaatcgcacctgctgttcatctacaccaatcgggctgaacgggttgatgtccaggctacgcacttcaatatattcaatgccgccacgtaacagcgcatcagaagggctctcgccgctgcgggtaacgcgttttggacgaatcggcgcgtacagttcgttttcaatctgcaacacgttgctgttgatttgcagcctcttaccgtctttctcaataccaatcttcgcgtactcttcgcttggcgttttgattgcctgtttaaggcccgctacgtactcgtaaagatcgttgaaggtaataccaagattgctttggcttttattggtatagccgagatcgctcaaacgaagagaggtcgcatacggcaggtaatacataccgcactcggttttctcaaacggcaggctcgttggttttccttgcaggaaagaagaacaaatcgccggagatgcaccaaacagataaggaatgacccaaccgaaacgatagtaattgcggataacgcggaaatagcccgcagaaattttctctttggcatcagcgccgctgatatcaccgcacttcgcttgccagaatgccattggcaaagagaaattgtagtgcacgccggaaatggtttgcatcagcgcgccgtagcgatttttcagcccttcacgatacagcgttttaaagcgtccggtgttagaagtgccgtactgtgccagttcgatgtcctgaccttctgcgatgtagcatggcatacttaacggccacatccgctcatcgcccatattgcgcgccgtataacgatgcagatcgcgcataaaggtcagcatatgttcaatatcaccatccactggtgtaatgaattccagcaatgcttccgcaaaatcggtagtaatccatttgtgcgtcagtgcggaacctaatgcttcaggatgacctgttgttgccagtgtgccatcagcattaacacgcaaagtttcgcgctccagcccacgctgtatcccctttaacgcctgaggatgtttttccagccaggccagcgcctgacttacgtccgggatcaaattgacctcccgcctgtcaaaatcgttttaattagcataactgtaatggtgaccatatgtgcaggcctacaattagtgccaccacatcatgccctgaacggtcgctgctgcaactgcaacatagcgtaacgctttaccaaggcacaaaaaaaagattaccggtccccagctgatgcgcatccatcccgctaacagacacagtaaatcgccaaccacgggcatccagcttaataatagcgtgactgcaccatagcgtttcagccagccggtagctttctcttgccagcggcttgttttacgcaatggaaagaaacgcccaaggataacgttagttaaccctccaaggctattacccattgttgctgttaaaactaaaacccagggatgactgatcccggaaagcaacattgccaccagcacgacttcggagttgccgggtaatagtgtagcgctgagaaaactactggcaaacaagctgaaaaggcttaacgcttcactcacagcaagcgaacatccacggcgtccatgcctgctgcacgggccgcctgaataccgaaatcggcatcttcaaagaccacacactgcgtcggttgcacgcccatacgctgcgcgcacaacaaaaatgtgtctggcgcgggtttatggtgtttgacgtgatcggcagcgacgacggcgtcaaaataatggcgtaatcccaggtgcgccagcaatgcctcagcgatggcgctttcactccccgttcctacagccattgggcgacgaccatgccaacttttcaccacatcaacaagaggaagcggttcgacgctatccagcagcatacttcttactgcttctgttttttcacgcgctaacgcatgcgggtcgagatcggcctgattcagctcaataattgcctgagcaatacgccaggtggggcttccattaagcgcaatcatcgcctgaatatcgtactgaagaccgtagtgccctaatacttcgcgccacgctttacggtgcgtaggctccgtatccaggattgtgccatccatatcaaaaattaaacctgcataacgctcgtacatggtcttctcgcaagtcgaaaaatatgacgctactttagcgtaattgcttgattttgtcgctgatggcgaaggagaagaaaattcaggaaatggataaaggagttatttagaaatgagatatttttgaaggaaattttttggagaagatggtgcatccgggaggatgactcactgacgttcgcccttcgggccgttgctggcgcaacgttatccttcctggtgcctgcggttaataccgctatctcttcgataccttcattgctgaaggttacggagaatatggtgcatccgggaggattcgaacctccgaccgctcggttcgtagccgagtactctatccagctgagctacggatgcatcgggaaaacttattctactgctgatattgataccgctactaaagccatatcaattaagagatggtgcatccgggaggattactcgccttgcggctcgcccttcgggccgttgctaaagcaacgttatcatccctagtgcctgcggttaattccgctacctcttcgataccttcattgctgaagatttcggagaatatggtgcatccgggaggattcgaacctccgaccgctcggttcgtagccgagtactctatccagctgagctacggatgcatcgggaaatttattttactgctgatattgataccgctactaaagccatatcaagtaagagatggtgcatccgggaggattcgaacctccgaccgctcggttcgtagccgagtactctatccagctgagctacggatgcatcgggaaacttactttactgcagattttttgataccgctactaaagccgtatcaagtaagagatggtgcatccgggaggattactcgccttgcggctcgcccttcgggccgttgctaaagcaacgttatcctccctggtgcctgcggttattaccgccacctcttccataccttcatcgctgaaagtacgtagaatatggtgcatccgggaggattcgaacctccgaccgctcggttcgtagccgagtactctatccagctgagctacggatgcaaatggcggtgaggcggggattcgaaccccggatgcagcttttgaccgcatactcccttagcaggggagcgccttcagcctctcggccacctcaccacacgcctcttacgagtgcttcgaagaacttgtttatcgctcatcgtcgctgcgtggcgcacatattactttctgagacttataagtcaaacaatttttcctacacttttatcgtttgcacacttcacgttcaattagtctgtaaaaacgtcaaaaagagtgttttatcaacagaagaatggaggtctgacagatagtagtaatgcaaaaaaatggagacttaagttgaatgaacgggagtaaagcgaaaagactatagagtgaaggagaaattttgagggtgcgtctcaccgataaagatgagacgcggaaagattagtaactggactgctgggatttttcagcctggatacgctggtagatctcttcacggtgaacagaaacttccttcggggcatttacgccaatacgtacctggttgccctttacccctaaaactgtcacggtgacctcatccccaatcatgagggtctcaccaactcgacgagtcagaatcagcattctttgctccttgaaagattaaaagagtcgggtctctctgtatcccggcattatccatcatataacgccaaaaagtaagcaatgacaaacacattacatctaagcagtcatggcattacattctgttaaacctaagtttagccgatatacacaacttcaacctgactttatcgttgtcgatagcgttaatgcgaatgccgtgaagcgagtccacggcattgcctgacgcttatattattgcaatttcgcgctgacccagcctttcacactggctaacgctgcaggtaaggccgcagcatccgtaccaccggcttgcgccatgtcaggacgtccaccacccttgccgcccacctgctgagcgaccataccaatcagttcccctgctttcacacgatctgtgacgtccttagatacgcctgcaatcagagaaaccttaccttcgactaccgttgccagcacgataattgtgctccccagctgattttttaaatcgtcaaccatggtacgcaacattttcggctcaacaccgctaagctcgctaaccaacagcttaacaccattaacatcaattgccttactggaaagatttgcgctctcctgtgcggcagcttgttctttaagctgttgtaactctttttccagctgacgcgtacgttccagtacactgcgcactttatcagccagattattgctatcgcctttcagcagatgcgcgacttcgcttaagcgatcgctgtctgcatgaacggtggcgatagcaccttctccggttaccgcttcgatacgacgaacgcctgcagcagtaccgctttcagagatgatgcggaacagaccaatatcaccagtgcggctggcgtgagtaccgccacacaactcggtagagaaatcgcccatgctcagcacgcgtacgcgctcatcatacttctcgccgaacagcgccatcgcacctttcgctttcgccgcttcgagatccatgatgttggtttcgatcggcaaattgcgacgaatctgtgtgttcaccaggtcttcgaccgcacgaatctcttctggtttcatcgcttcgttgtgactgaagtcgaagcgcagcaccttgtcgttaaccagactacctttctggcttacatgagtacccagaacctggcgcagcgcagcgtgcatcaggtgcgttgcggagtgattcagacgaatacgggcgcgacgagcctcatcaacatcagcctgcaccgcgtcgcccactttcagagaacccgcagcaagtttaccgatgtgaccaatcgcctggccgtatttctgcgtatcttccaccgcaaaggagaagttagcgcctttcagttcgcctttatcgccaacctgaccgccggattccgcatagaatggcgtttgatccagcacgaccacagcttcctggcctgcattgatggcatcaaccgctttaccatcaacaaacagcgcagtcactttgccgttcagttccagatggtcatagcctttaaattcagatgcactgtcaacacggatcattgcgttgtaatcggcaccaaagccgctggcttcgcgcgcgcgacgacgctgctcttccattgcagcttcaaaaccagcttcgtcaactttgatgttgcgctcacgacaaacatcagccgtcaggtcaaccgggaagccataggtgtcgtacagacggaaagcagtttcaccatccagcgtatcaccagaaagttttgccagctcttcatccagcaacgccagaccgcgctccagagtacgagcaaactgctcttcttcagtcttcagcacctgctcaacctgcgcctgctggcgtttcaggtcttcacccgcagagcccataacgtcgatcagcggaccaaccagtttgtagaagaaggtttctttcgcgccgagcatattaccgtgacgcactgcgcgacgaatgatacgacgcagtacataaccacggttttcattggacggcattacgccatccgcgatcaggaacgcacaagaacgaatgtggtcagcgattacgcgcaggcttttattgctcagatcggttgcgccagtgactttcgctaccgcctggatcagcgtgcggaacaggtcgatgtcatagttagagttaacgtgttgcagcaccgcagcaatacgctccagacccataccggtatctacagacggcttcggcagcggttccatcgtgccatcggcctggcggttgaactgcatgaagacgatgttccagatctcaatgtagcggtcgccgtcttcttccgggcttcccggagggcccccccaaatgtggtcgccgtgatcgtagaagatttcggtgcacgggccgcacggaccagtgtcacccatctgccagaagttgtcagatgcgtatggcgcacctttgttatcgccgatgcgaataatacgttcgcgcgggatccctacttctttttcccagatttcgtaggcttcgtcgtcgctttcatagacggtaacccacagacgctctttcggcagggcaaaccatttttcgctggtcagcagttcccatgcaaactgaatggcatcgtgtttgaaatagtcgccgaagctgaagttgcccagcatttcgaagaaggtatggtgacgcgcggtgtaaccgacgttttccaggtcgttgtgtttaccacccgcacgcacgcagcgttgggaagtggtagcgcgggaataattacgcttgtcgagcccaaggaacacatccttgaactggttcatcccggcgttggtaaacaacaaagttgggtcgttatggggtaccagggagctgctggcaactacctgatgtcccttactatggaaaaagtcgagaaacgcctgacggatctcagcggtgctcttgctcataattatcctgaaatcaagctaacgaaatatcgccaccagctccagcgtgtcttaaccgccgggctggtaactgaaaagtgggaataagataagttttcttgactgggaagtaaaataccgtatgcgttcagtcggcaaaatttcgccaaatctcctggatatcttccatcagatagccacgatagagcagaaaacgctggatcttaactttttcactaaagacagttggcaaaggttcgccatattttcgcgtcgcctgatcgcgcgccagtgcgcaccagtcgatgtcacattcacgcatcgctttttctgtcgcttcgcgggaaatacctttctgattcagttcctggcgaatacgcgcaggtccataacctttgcggctacggctggcgataaagcgcgcaacaaatcggctgtcatcgagatagccatgttcatggcaccaggcaataacgcgctcgtaatcttctgccgtagcatcaatctcttctgggccatttttgcccataatcggtgccgcgagtttacgtcgcagttcttgctcactgtgatcgcgcaccgccagaatgcgtaccgcacgatccaacaggcgagcatatgccgggcgacgggatgtactttctgtcatggcatatccttacaacttaaaaaagcaaaagggccgcagatgcgacccttgtgtatcaaacaagacgattaaaaatcttcgttagtttctgctacgccttcgctatcatctacagagaaatccggcgtactgttcgggttgctcagcagcaactcacgtactttcttctcgatctctttcgcggtttccgggttatctttcagccaggcagtcgcattcgctttaccctgaccgatcttctcacctttgtagctgtaccacgcgcctgctttctcgatcagcttctcttttacgcccaggtcaaccagttcgccgtagaagttgataccttcgccgtagaggatctggaattcagcctgtttaaacggcgcagcgattttgttcttcaccactttcacgcgggtttcgctacccaccacgttttcgccctctttcaccgcgccgatacgacggatgtcgagacgaacagaggcgtagaatttcagcgcgttaccaccggtagtggtttccgggttaccgaacatcacaccaattttcatacggatctggttgatgaagatcagcagcgtgttggactgcttcaggttacccgccagcttacgcatcgcctggctcatcatacgtgccgcaaggcccatgtgagagtcgccgatttcgccttcgatttccgctttcggcgtcagtgccgccacggagtcaacgacgataacgtctactgcgccagaacgcgccagggcgtcacagatttccagtgcctgctcgccggtgtccggctgggagcacagcaggttgtcgatatcgacgcccagtttacgtgcgtagattgggtccagcgcgtgttcagcatcgataaacgcacaggttttaccttcacgctgcgctgcggcgatcacctgcagcgtcagcgtggttttaccggaagattccggtccgtagatttcgacgatacggcccatcggcagaccacctgccccaagcgcgatatccagactaaggctaccggtagagatggtttccacatccatggaacggtcttcacccaggcgcatgatggagcctttaccaaattgtttctcaatctggcccagtgctgccgccaacgctttctgtttgttttcgtcgatagccatttttactcctgtcatgccgggtaataccggatagtcaatatgttctgttgaagcaattatactgtatgctcatacagtatcaagtgttttgtagaaattgttgccacaaggtctgcaatgcatacgcagtagcctgacgacgcaccgcatcacggtcgccgctgaagcattcccgccgggtaatgccttcaccgcgggcagtggcaaaagcaaaccagacggtgccgacaggcttctcttcactgccgccatccggcccggcgataccactaatagacacggcataatcagcacgagccgctttcagtgcgcctatcgccatttccaccacgacgggttcactcaccgcgccatgctgcgccagcgtctcttcgcgtacgccgatcatctgcgctttggcttcgttactgtaggtgacaaatccgcgttcaaaccaggcggagctaccggcaatatcggtaatcactttcgctacccaaccaccggtacaagactcggcagttgttacggttgcgccacgggctttcagcgcctgcccaacctgttcacttaactgcatcagttcactgtcagtcatcacaacctctgtcagtcaaaaatttatgccggacaagatagcactttcgtcaggaagatggtgttggcgttgcaattttacgaggaggattcagaaaaaagctgattagccagagggaagctcacgcccccctcttgtaaatagttactgtactcgcgccagcgccacggcttgtcctaactgccagaccgccattgcgtaatgggtgctgtggttgtaacgggtgatggtgtagaagttcggcagaccgtaccagtactggtagccggtgccaacatccagacgcagcaggctggcttgttgatggttgcccagcggctgctgtggcgttaaacctgcggcggcaagctggctaatgctgtacttagttttgaagccatttggcaagcctggagcctgaccgtttgccattaccgcgacctgatcgcctttcacccagccgtgcgctttgaaatagttcgccacgctaccgatcgcatcaaccggatcccacaggttgatatgcccgtcgccgctgaaatctaccgcatattgtttgtaagagctcggcataaactgtccgtagcccatcgccccggcaaaggaacctttcagattgagcggatcgtcctgctcgtcgcgcgccatcaacaggaaggtttccagctcgccagagaaatactccgcgcggcgtgggtagttaaaactcagcgttgccagcgcatcgaggatgcgagttttccccatcacgcgcccccagcgggtttcaacgccgataatcccgacgataatttccggcggtactccatacacctgccacgcgcgattcaacgcatcttcatactgattccagaaaaccacaccgttctgcacgttgtccggcgtaataaattttttgcgataacggagccatgcgccgttcggaccacttggcggtttcacgcttgtggttggtgcctggttatccatcagccgcagtacgctatccagacgcttcgcctgggagagaatttcctgcaactgctgacgatcgaaaccgtgtttgttcaccattttgtcgatgaactgctgggcattcgggttattagcgaaatcgccgcccatctgcatcacattgtgctgcggctcaagcaggaagccgccagacggcgttccggtggtcgtatcagtctcagtaggttttggcttgctgctacaggcggcaagcaacacaaaaaggggaagcaatgttacataacgacgcttgaacatgaggggtccatttaacagattcaaccaggggcaagtatggtaaagcatcacgccccgcacaaggaagcggtagtcactgcccgatacggactttacataactcaactcattcccctcgctatccttttattcaaactttcaaattaaaatatttatctttcattttgcgatcaaaataacacttttaaatctttcaatctgattagattaggttgccgtttggtaataaaacaataaatcctgaaggagagaacaatgatagaaaccattactcatggtgcagagtggtttatcgggctgttccaaaagggcggagaggtgtttaccgggatggtgaccggcattcttccgctgttgattagcctgctggttatcatgaacgcactgattaattttatcggtcagcatcgtattgaacgttttgctcaacgttgcgccggtaaccctgtttcccgttacctactgttaccgtgcattggcacgtttgtcttttgcaatccgatgaccctaagcctgggtcgctttatgccggaaaagtacaaacccagctactacgcggcggcctcttatagctgccacagtatgaatggcctcttcccccatatcaaccctggcgaactgtttgtttatcttggcattgccagcggtctgacaacgctgaacctgccacttggcccactggcggtgagttatctgctggttggtctggtcaccaatttcttccgcggctgggtgaccgatctgaccaccgccatttttgagaaaaagatgggcattcaacttgaacaaaaagttcacctggcaggagcaacaagttgaaataacacctggcaggagcaacatcatgacgcatattcggatcgaaaaaggaacgggtggctggggcggcccgcttgagctgaaagccacgccgggaaaaaaaatcgtctatatcaccgccggtacccggcctgcgattgttgacaaactggcacagcttactggctggcaggctattgacggatttaaagaaggtgaacccgcggaggcggaaattggtgtcgcggtaatcgactgtggcggcacattacgctgcggcatctatccgaaacgacgtattcccaccattaatatccacagcacgggcaagtccggtccgctggcgcagtacattgtggaagatatttatgtctctggcgtaaaagaagaaaacatcactgtagtaggtgatgcgacaccacaaccctcttccgtgggccgtgactatgacaccagtaagaaaatcaccgaacaaagcgatggtttactggcgaaggtgggaatgggcatggggtccaccgttgcggtgctgtttcaatctggtcgtgacaccatcgacactgtattaaaaaccattctgccgtttatggcattcgtcagcgcgctcattggcatcattatggcttctggccttggtgactggattgcccacggtcttgctccgctggcgagccatccactgggtctggtcatgctggcgctcatctgttccttcccactgcttagtcctttcctcggcccaggcgcagttatcgcacaggttatcggcgtattgattggcgtgcagattggtctcggcaatattccgccgcatctggctttaccggcactgtttgccatcaacgcgcaggcggcctgcgacttcatcccggtcggtttgagcctggcggaagcccgtcaggacacggttcgcgtcggtgtcccttctgtactggtgagccgctttttaaccggcgcgccgactgtactgatcgcctggtttgtctccggttttatctatcaataaaggctgaaacatgaccgttatttatcagaccaccatcacccgtatcggcgcgagtgccattgacgccctcagtgaccagatgctcatcacctttcgtgaaggcgcgcctgcggacctcgaagagtattgcttcattcattgccacggcgagttgaaaggtgcactccatcccggtttgcaatttagtctcgggcagcatcgctatccggtgaccgctgttggcagcgtggcggaagacaaccttcgcgaactgggtcatgtcaccctgcgcttcgatggtttaaacgaagcggaatttccgggcactgtccatgtggcaggccctgtccccgacgatatcgcgccgggaagcgttttgaagtttgaatctgttaaggagtaaaaaatgaatcaggttgccgttgtcatcggtggtgggcaaaccttaggcgcgttcctgtgccacggtctggctgccgaggggtatcgcgtcgcggttgtcgatattcagagcgacaaagccgcaaatgtggcacaagaaattaacgccgaatatggtgaaagtatggcgtacggttttggtgctgacgccactagcgagcaaagcgttctggcgctctctcgtggggtagatgaaatctttggtcgcgtggatttgctggtctacagcgccggaatagcaaaagcagcctttatcagcgacttccagctcggcgattttgaccgtagcctacaggtgaatctggtgggttatttcctgtgtgcgcgtgaatttagccgtttgatgatccgcgacgggattcaggggcgcattattcagatcaacagcaaatccggcaaagtgggcagcaaacacaactctggctacagcgcagcgaaatttggtggcgtcgggctgactcaaagtctggcgctggatctggcggagtacggcattacggtgcatagtctgatgctcggtaacctgctgaaaagcccgatgttccagagtctgttgccacaatacgcgaccaagctgggtatcaaaccggatcaagtcgagcagtattacatcgacaaagtaccgctcaaacgcggctgcgattatcaagatgtgctgaatatgctgctgttctacgccagtcctaaggcgagctactgcaccggacagagcatcaatgtcaccggcggtcaggtgatgttctgatcaacagcggagatccattaaggatctccgtgagactatagaatgcctgatgcgctacgctcatcaggcatacaggacttccgccactacattaaggaaaagttatggtatccgcactcatcaccgtcgccgttatcgcctggtgtgcgcaactggccttaggcggctggcaaatttctcgttttaaccgtgccttcgacacactatgccagcaagggcgggttggcgtgggccgttccagcgggcgctttaaaccgcgggtcgtggtcgccatcgcgctggacgatcagcagcgcatcgtcgacaccttgtttatgaaaggactgaccgtcttcgcccgaccgcaaaaaattcccgcaattaccggtatgcatgcgggtgatttacagcccgatgtgatctttccccatgatccactaagtcagaatgctctaagtttggcgcttaaactgaaacgtggataatttcgttgtgaatgttacttgcttgcgaagttatcattttgaaacctaaatcaggtaatcacgcccatgaaacctcgtcagcgtcaggccgccattctggagtatctgcaaaagcagggtaaatgcagcgttgaagaattggcgcaatactttgacaccacaggcacaaccattcgcaaagatctggtcattctggaacatgccggaaccgtcattcgtacttatggcggagtggtgttgaataaagaggaatccgatccgcctatcgatcataaaacactcatcaacacccacaagaaagagctgattgcagaagctgccgttagttttatccatgatggcgatagcatcattcttgatgctggcagtaccgttttgcagatggttcccctgctcagccgctttaataacatcacggtgatgaccaacagcctgcatatcgtcaatgcgctatccgaactggataacgaacaaactatcctgatgccaggcggaacgtttcgcaaaaaaagcgccagttttcacgggcaactggcagagaatgccttcgagcatttcaccttcgataaattgtttatgggcaccgacggcatcgatctcaatgcgggcgtaaccacctttaacgaggtttataccgtcagtaaggcaatgtgcaatgccgcgcgcgaagtgattttgatggcggacagtagtaagtttggccgtaaaagccccaacgtagtttgcagtcttgaaagcgtcgataagctgattaccgacgcaggtatcgatccggcgtttcgtcaggcgctggaagagaaagggatcgatgtgatcataaccggagagagcaatgagtgaagcactactgaacgcgggacgtcagacgttaatgctggagttgcaggaagcaagccgtttaccggaacgtctgggcgatgattttgttcgcgccgccaatatcatcctgcactgtgaaggcaaagtggtggttagcggaattggcaaaagcggccacattggtaagaaaatcgccgcaacgcttgccagtaccggcactccggctttttttgtccatccggcagaagcgctgcacggcgatctggggatgatcgaaagccgcgatgtgatgctgtttatctcttactccggtggcgcgaaggaactggatctgattattccgcgtctggaagataaatctatcgcgctgctggcgatgaccggcaaaccgacgagtccgctgggcctggcggcaaaagcggtgctggatatctccgtagaacgcgaagcctgcccgatgcaccttgcgccgacctccagcaccgtcaataccctgatgatgggtgacgcgctggcgatggcggtcatgcaggcgcgcggatttaatgaagaagattttgcccgctcccacccagccggggcactgggcgctcgcttgctgaataaagtgcatcatctgatgcgccgtgacgatgccatcccacaggtggcgttaaccgccagcgtgatggatgcgatgctggaactcagccgcaccggtctggggctggtggcggtatgtgacgctcaacaacaggtacaaggcgtctttaccgacggcgatttacgtcgctggctggttggcggcggcgcactcaccacgccagtcaatgaagcgatgacggtcggcggcaccacgttgcaaagccaaagtcgcgccatcgacgccaaagagatcctgatgaagcgcaaaatcactgccgcaccggtggtggatgaaaacggcaaactcaccggcgcaataaacctgcaggatttctatcaggccgggattatttaatccttcaatcccagacgtttcgccagccgatgcaggttggcgacgtcggtttccagcatccgcgcgcaggcagcccagttgtgatgattttgtgccagtgcctgacgaatagtttcacgctggaacgcttctgtcgcttcacgcaggttttgcttaacaacgggcaccgccgccacttctggcgtcggcaacgtcacctcaggaaaagcaaaatgttgcgcctcaagaatcacttcatcgccgctgcgggtggctctcgccagaactaccgcccgatgaatagcatgttccagttcgcgcacgtttcccggaaaactgtagtgttgcagtaaatttcgcgctccggcacttaataccacgcgggagagcccctgccgcaaacgacactgctcgcagaaataccccgccagcagaatgacatcatcgccccgctcacgcagcggcggcacgctaagtggaaacacgctcaggcgatgaaacaaatcggcgcggaatcgccctgccagcacctcttcgcgtaaatcgcggttagtcgccgccagcacgcgcacatcgacccgcaaacaacggtcatcgccaacgcgctgaatatcgccatactgcaacaccctcagcagcttggcctgcaatgccaagctcaactcgccgatctcatccagaaacagcgtgccgttatccgccatttcaaacttcccgctgcgattactgatagcgccagtaaacgctcctttcacatgcccgaacaactcactttccgccacactttccggcagtgcagcacagttgagatagaccagcggattcaccgcccgtgggctggcttcatgaatcgctttcgccaccagctccttaccggttccagtctcaccgctgatcaggacgttgagatcggacgccgccacaatctcaatctcttttttcagttgcgtcatgccaggggacaagccaatcatctgcgtctgtttcaccgcttcaaacggcgtggcatcgcctggcagcatattctggctttccagttgttcaatcagcaacgcattgcttaacgctcccgccgccagcgcagcaatcagccgtagctcttcgtcgctgaaaacatcgaactgatcgggctgcatcccgtcgagcgtcagtgcgccgatcaggttttgcccggcaaacaatggcagaccaacgcaggcgtgaaccttcagactctcctgcccaggaatcaaaccgtcatagggatcgggcaattcgctgtctgcgggaaagcgcaccacatccccggcgcgggcaatcgcttccagccgtggatgcccttccagcgcaaagcgtctaccgagtacatcctttgccagaccgtcgatggcaagcggaataaactgccggctatcgtaacgtagcaacgcagacgcatcgcactccagcacctgacgtagcgtggtgatcaggcgctgaaaacgatcctggtgaccaatcccacgctgcaattcgatggcgatattcgccagcacatcaacggaaaaactcatctttgcctcactgtcaatttgactatagatattgtcatatcgaccatttgattgatagtcattttgactactcattaatgggcataattttatttatagagtaaaaacaatcagataaaaaactggcacgcaatctgcaattagcaagacatctttttagaacacgctgaataaattgaggttgctatgtctattgtggtgaaaaataacattcattgggttggtcaacgtgactgggaagtgcgtgattttcacggcacggaatataaaacgctgcgcggcagcagctacaatagctacctcatccgcgaagaaaaaaacgtgctgatcgacaccgtcgaccataaattcagccgcgaatttgtgcagaacctgcgtaatgaaatcgatctggcggatatcgattacatcgtgattaaccatgcagaagaggaccacgctggggcgctgaccgaactgatggcacaaattcccgatacgccgatctactgtacagccaacgctatcgacagcataaatggtcatcaccatcatccggagtggaattttaatgtggtgaaaactggcgacacgctggatatcggcaacggcaaacagctcatttttgtcgaaacaccaatgctgcactggccggacagcatgatgacttacctgacaggcgacgcggtgctgttcagtaacgatgctttcggtcaacactactgcgacgagcatctgttcaacgatgaagtggatcagacggagcttttcgagcagtgccagcgttactacgccaatatcctgacgccgttcagccgcctggtaacaccgaaaattaccgagatcctgggctttaacttaccagtcgatatgatagccacttcccacggcgtggtatggcgcgataacccgacgcaaattgtcgagctgtacctgaaatgggcggctgattatcaggaagacagaatcaccattttctacgacaccatgagcaataacacccgcatgatggctgacgctatcgcccaggggattgcggaaaccgacccacgcgtggcggtgaaaattttcaacgtcgcccgaagcgataaaaacgaaatcctgactaatgtcttccgcagtaaaggcgtgctggtcggcactagcacgatgaataacgtgatgatgccgaaaatcgccgggctggtggaggagatgactggtttacgcttccgtaacaaacgcgccagtgctttcggctctcacggctggagcggcggtgcggtggatcgtctttccacgcgcctgcaggatgcgggtttcgaaatgagccttagcctgaaagcgaaatggcgaccagaccaggacgctctgaagttatgccgtgaacacggtcgcgaaatcgcccgtcagtgggcgctcgcgccgctgccgcagagcacggtgaatacggtagttaaagaagaaacctctgccaccacgacggctgacctcggcccacggatgcagtgcagcgtctgccagtggatttacgatccggcaaaaggcgagccaatgcaggacgttgcgccaggaacgccgtggagtgaagtcccggataacttcctctgcccggaatgctccctcggcaaagacgtctttgaagaactggcaagcgaggcaaaatgagtaacggcattgtgatcatcggtagcggcttcgccgcccgccaactggtgaaaaatattcgcaaacaggacgccactattccattaaccctgattgccgccgacagcatggatgagtacaacaaacctgacctcagccatgttatcagtcaggggcaacgtgccgatgaccttacccgccagacggcgggtgaatttgccgagcagtttaatctgcacctgtttccacaaacctgggtgacggatatcgatgccgaagcccgtgtggtgaaaagccagaataatcagtggcaatacgacaagctagtactggcaaccggtgccagtgcctttgtcccgcctgtgcctgggcgtgagttaatgctgacgttaaatagtcagcaagagtatcgcgcctgtgaaacgcaactgcgggatgcccgacgcgtgttgattgttggcggtggtttgattggtagcgaactggcgatggatttttgtcgtgcaggcaaagcggtcacgctaatcgacaacgctgccagtattctggcgagcttaatgccaccggaagtaagcagccgcttgcagcatcggttgacggagatgggcgttcatctgctgttgaaatctcagttacaggggctggaaaaaacggattctggcattcaggcaacgctggaccgccagcgcaatatcgaagtggatgcggtaattgccgccaccggactgcgcccggaaaccgccctggcacgacgcgccgggctgacgattaatcgcggcgtttgcgtcgatagttatctgcaaaccagtaataccgatatttacgcgctgggcgattgcgcggaaattaacggtcaggtattgccgttcctccagccgattcaacttagcgcgatggtgctggcaaaaaatcttctcggcaataacacgccgctgaaactcccggcgatgctggtgaaaatcaaaacgccggaattaccgctgcatctggcaggcgaaacccagcgtcaggatttacgctggcaaattaataccgaacgccagggaatggtggcgcgcggcgttgacgatgctgaccagcttcgcgcctttgtggtcagtgaggatcggatgaaagaggcatttggattgttgaaaacattgccgatgtaagtgggctactgtgcctaaaatgtcggatgcgacgctggcgcgtcttatccgacctacggggacgcatgtgtaggccggataaggcgtttacgccgcatccggcaatggtgtccaaatgcaacacgttttatccgttctggacttcacccgctaaccaacgcgccgcagcaataaccccctgccccagagacaaaccgccatcacccgccggtaaactctgtggaaagagcaatgtgaaatcagcgagataatgcgccagacgtgcacgcagcaaacggttatgaataaccccgccgctaaataccagcgtagtgataccacgcatcgtggcctgctcacgcatcaacgcggcaaaaccctgcgccagcgcatcatgaaacgcccacgcgcgttgattaaccggtgcctgccagttcagccactgctgccagaaagtggcgagatccagttgattgtccacccgcggcattgtcaccggatgcgtcactccgtggcaactggctgcgagcgcctccagagcacaagccgcttcaccttcataacttaacgtggctggcgcacagcccagtgccgccgccactgcatcgaaaaaacgcccacagctactcgccagcggcgcgttaattccacgctcaatggcccgcgccagcacgctccagttttgctgttgcacacttgctgtttcagagtaattctgccactccggcacaaagcgcaggcactgcgccagcaggtttcgccacggctgcttcgctgccaaatcgccacccggaagcgccactgcaggcaagccgcccaggtgctcacattcgcgatagttcacccgcaggcactcgccgccccacaaagcgccgttctcccccataccgataccgtcgagcgtcaaagcaatgacatcaccgccatccagcggccactgatgctctgccagacacgccgctgcatgggcatgatgatgcagtaccgtttgcgtcggcagattcatttcacgcgcccactggctggagacatagcccggatgcgcgtcatgcacaacgtattgcggggtaaaatcgtagatgttttgcatcaggcgtaacgcttcgcgccactgcatctggatgccatcgtcacttaaatcgcccagatgctgactcaacaccgcttgttcaccgcgcaccaggcagaaggtatttttcagatccgcgccgagacacagcacaggcggaacatttttaaagcccggaggcaaagccagcgcatccggcacatacccccggctacggcgcagcatttcgccgctttcgcgcaccacgctatcatccatccgctgcacgatgtcgcggttatgtatcaagaatccgtcggcaatgccctgcaaatccgccagcgcctgttcgttgctgatagctggtggtttaccgctcaggttgccggaggtcatcaccagcgggcattgcagttcctgtaacagcaaatgctggagcgggttcgcaggcaacattaccccgacttcgttaaggtcaggggcgatatcatcacaaagctcaggaacgtattttttatccaccagcacaatcggcgcggcgggcgtggtaagcaactggcgcgcagcgtctggtaaaccgtcagccactggcaacatgaccgccagcggtttcgccgggcgatgtttgcgcgcccgaagtgtcgccaccgcgttactgttacgtgcatcgcaggcaagatgaaatccgccaatccctttgatggcgacaattttgcccatttttaactgtgcgatagctgcctgtaatgccgcctcttgttccgcatgttcaccatgacttacccattcaagatgcgggccacactccgggcaggccaccggctgggcgtggaagcgacgatcgagcgggtcacggtactctttgtcacaggccggacatagcggaaacgccgccatcacggtaaacgggcggtcgtaaggcatggcgcgaataatggtgaaacgcgggccgcagtgggtacagttgataaacggataacgataacgccgttcgcctggggtattcatttcggcaaggcaagcagggcaagtagcggcatcgggaacaatttgcgtattcatggtgccgcctgtgctctggcgtatagtgaactcggtgggcagttgactccagataaacggctcacgctcgacgctatcaatacgcgccagcggcgggcagtgctgatacaattgaacaagaaacgtttccgggtcttcccgcagccggacttctacgccatcgccgtcattacagacatcgccgtgaagatttaattgctgtgccagctgccagacaaacggacgaaaaccgacgccctgcactttgccacgaatacgcagttggacaccgcaagatgtgttttttgccattgagttattcccgccatcatgaattgcgtaacccgccctgccggacacgacagcgtcgcatccggcagtcacaggtcggcgataccgcccgctccgtattctacgaatatttccgggaattcctttgatgccagaacagttctgtaagatttttagaacatcagcgccgtacggcggcgtttttctgcgctcagttgttcaagtttattacgatcgacacaaatcagcgcatgagtcgggcaagccgccatacacgccgggccgtcttcacgatggttgcacaggtcgcatttattggcttcggctttgtcagcccgtacattcagacccgcgccgctgttgcggatcaccggacgtaccaccacttccatcgcaccatacgggcaagccacaacgcaggttttgcaaccaatgcaacgttcctgcatcacatgaacaaaccctttatcacggctgatagcaccattcgggcagacgttagcgcacggtgcatcttcacactgacggcaaactgtcgccgtggaaatgttcacacctttaatgacatggatacgcggtaaaaaagtttccggggtcaggcttgcacagtcctgattttcctgatgagaaaccacgcacgctacttcacaggtacggcaaccaatacatttactcgcgtcagcaatgatgaaacggttcatcaaattctccagcaatgacagttaatgcgccgatacattcacaaatcatgccagtttttaatttactgttatttaaggaaattaatttctgtaatgcaggaaaaacgatgtcatcgacactagtgacgatgacatgtgatgacaatgtttatcggctaggagcaatgagactgtcgcggcggatcagttttccgctgaaggttttcggcggactgaaatccccgccatcgagcataaaaatcagccgtccaataatttcctgaatcatctcagtcaccggaatttttacgctggagagcgccggaacggtgtagggggcaatagcgatatcatcgaatccgataacactcacctgctctggcaccgctacgccgcgctcgtgtaacgctttcatcgcacctatcgccatatcgtcgttactggcaactaacgcgctaaatttagccccacgttcgagcaacatttctaccccttcggccccgctggcaggcgtccatttaccgttagcgataagtttttcattgagcgcaataccatgctgcgccagcgcgtctttatacccggcaagacgttcaatgctggtgggggaatccatgctgccggtaaggaaagcaatctcctgatgcccggcgtttatcaactctgccacggcgttaaaactggtctgtttatgatcgcaccagacgctatggctgctgtttttgcgcaggcggcgattaagcaccattatcggctgactgtgcgcgtcaatgatgtcatcgatctcatccacgcttaaaaaacgcgggtaaatcatgatcgcgtcgcagcgcagatccagcagatactgaatcgcctggcgctcttcttctgcgctgtgtttaccatctgccaatagcaactgccgccctttctcttccgccattcgcgcggcatgaaagagtaattcactaaaataaatgccgtggtaaagcgtgttggtcactaccagccccagcgtctgagtactcttcgcgctcagattgcgcgccagcaagtttggacggtaaccgctctcttctaccgcctgaaacacgcgatctttagtctcctggctgacgtagccattaccactaagcacgcgggaaacggtcgctttactaaccccggcgcgcttcgccacttccagcatcgtcgtcatcattttcatccctttacacgcaatcaacgcagtgtactgcaccgtttgccgattgtccttgcacaatcggcgggaaaaatattcaggtgaccggtttcacaaatataaaaaatgaacaattcactctcttgcttatttagtgacaactattcatgattttgtgaaaccggtttcttaattccgtttcagcatcggcatttttccgtcacgtcgactgataacaactacatctaccctactgataacaggataaaatccgatggccaaaaattatgcggcgctggcacgcagcgtgatagcggcactgggcggcgttgataacatcagcgcggtcacgcactgtatgacgcggttgcgctttgttatcaaagatgatgcacttatcgacagcccgacgttaaaaaccatccccggcgtgctcggcgtggtacgtagtgacaaccagtgtcaggtgattatcggcaataccgttagtcaagcctttcaggaagtcgtcagcctgctgccgggagatatgcagcccgcacagcccgtgggtaaacccaaactcacgctacgtcgcattggtgcggggatcctcgatgcgctgatcggcaccatgagtccgctgatcccggcgattatcggcggaagcatggtcaaactgctggcaatgatcctcgagatgagcggcgtgctgacaaaaggaagcccgaccttaaccattctgaatgtgattggtgacggtgctttcttcttcctgccgctgatggtcgcggcatctgccgccatcaaatttaaaaccaatatgagcctggcgattgccatcgcgggtgtgctggtacatccgagttttattgaactgatggcgaaagcggcccagggtgaacatgtcgaatttgccctgattccggtcaccgcggtgaaatacacctacacggtgatcccggcgctggtgatgacctggtgcctgagttatatcgaacgctgggtggacagcattacaccggcggtgaccaaaaacttcctcaaaccaatgctgattgtgttgattgccgcaccgctggcaatcctgctgattggcccgattggtatctggatcggtagcgccattagcgcgctggtttacaccattcatggttatctgggctggcttagtgtcgccattatgggcgcgctgtggcctctgctggtaatgaccgggatgcaccgcgtctttacgccaaccatcattcagaccattgccgaaaccggcaaagaagggatggtcatgccgagtgagatcggcgctaacctgagcctgggcggtagtagtctggcagtggcgtggaaaacgaaaaacccggaactgcgtcagacggcgctggctgcggcggcaagtgccattatggcggggatttccgaaccggcgttatatggcgtggcgatccgcctgaaacgtccgcttatcgccagtcttatcagcggttttatttgcggcgcggttgccggtatggcggggcttgccagccacagtatggcagcgccggggctatttaccagcgtgcagttcttcgatccggcgaatccaatgagcatcgtctgggtgttcgcggtcatggcgctggcggtggtgctgagctttatcctcacactgttgctcggctttgaggatattcctgttgaggaagcggctgcccaggcgcgaaagtatcagagcgtacaaccgaccgtcgccaaagaagtaagtcttaattgaggatgaaaatgagtgtatttccagaaagttttttatggggcggcgcgcttgccgccaaccagtctgaaggtgcgttccgtgaaggtgacaaaggtctgaccactgtcgatatgatcccacacggcgagcatcgaatggcggtgaaactggggctggaaaaacgttttcagttgcgagatgacgagttttatcccagccatgaggcgacggatttttatcatcgttataaagaagatatcgccctgatggcagagatgggattcaaggttttccgtaccagtattgcctggagccgtctctttccgcagggcgatgaaatcacgcccaatcagcagggcattgctttttatcgttctgtctttgaagagtgtaaaaagtacggtatcgaaccgctggtcacgttgtgccacttcgatgtgccgatgcatctggtcaccgaatatggctcctggcgtaaccgcaagctggtggagtttttcagccgctacgccagaacctgctttgaagcatttgatggtctggtgaaatactggctaaccttcaatgaaatcaacattatgttgcatagcccgttctccggcgcgggtctggtgtttgaagaaggtgaaaatcaggatcaggtgaaatatcaggccgcgcatcaccagctggttgccagtgcgctagccaccaaaatcgcccatgaggttaacccgcaaaatcaggtgggctgtatgctggcgggcggtaacttctacccttacagttgcaagccggaagatgtctgggcggcgctggagaaagaccgggaaaacctgttttttatcgatgtgcaggcgcggggcacgtatccggcttactctgcccgcgtattccgcgaaaaaggggtaaccatcaacaaagcaccgggcgatgatgaaatcctgaaaaacaccgtcgattttgtctctttcagctattacgccagccgctgcgccagcgcggagatgaacgccaacaacagcagtgcggcgaacgtggtgaaaagcctgcgtaatccgtatctacaggtgagcgactggggctggggaattgatccactcggtctgcgtatcaccatgaatatgatgtacgatcgttatcagaagccgctgtttctggtggaaaacggcctgggcgcaaaagatgaatttgctgccaatggcgagattaacgacgactatcgcatcagctacttacgcgaacatatccgcgcaatgggcgaagcgattgcagacggcattccgctgatgggctacaccacatggggctgtattgatttagtttccgcctctacgggtgaaatgagcaaacgctacggctttgtctttgttgaccgtgacgacgcaggcaacggtacgctgacgcgcacgcgtaagaaaagtttctggtggtataaaaaagtgattgccagtaatggggaagatttagagtaagtaacagtgccggatgcggcgtgaacgccttatccggcctacatgtcgcacgaaccatgaaggcccgataagcgcagcgcatcgggcaatttagcatttggcatcagagctggttcaccccatcaagaacatccctgtcctgattccttaatgaaaaattactcttcttccaccgctaactgcgcgaagccgccatttccttcccagccttccagtcgttgataaacggtttctaccgcatctttaatcggctgggtcatcgggtagtaaaagccgacgatatccggctgaatgccgaggaaaatcacttcgccaatatcttctttcaactggtcgataaggtaattcaacggcatgttatgggtagtcatcataaacatctcggcgatatcatccgggtcgatgatgcggatctcgccggggtttagccccatatccgtggcgtcgacaatcagcagtcgtgtcgggcgcagttcacggatagcgacgatgtcgttttccggtgcgctaccgccgtcaatcaccacccagttacctttcggcgcggcggcgcacttttccgccagcagcggacctgcgccatcatcgcccatcatgctattgccaacacagagtaaaacgtcagtcacgcagtctcctcaccatcaaatagatggcgttttcctgatgaatatcatgcagcatacttaacagcattgtactccattcctgctgctggctagtttgcgctgcccgggctttatcgaatgcgttggccagcatcggcacatggttaatgtcgatgacgatctcaccatatttcggcacgccttccattttgcggcgggcttcactgcctgcctccagagtggcaatccatgccagatattcatcccacgggcaggtgagcgccgcttccaggcaatcgataaccccaaggtggtgaccaatcgccaggctgtaatagaccacctgctgcgcctcggcgggcgtggcatcgttctcatcaataaatttatggctcagttgactgaacaccaccttttcactcatcggatacgcgcctcttcaacaacatgattcagatggctgacaatctcgttcagacgcggatcgttttccgcttccagccagcgtgcaacctgttcttcgccctgccctaactgtgtaaggtaatcatcggcaatctgacgaccgtaacgataacccgccaggcgacgtgcttcgcgatccactttcacgcgcagcggctgcaccatatcaccatgcaggatctccgccggttgttcatccagttcacccggcccacgggcgtgaattttctgctccagcaggccgagcgccattgcaaagccgtacagcgtggcggcaggcgttggcgggcagccagggatataaacatccacagggacaattttatccgtaccgccccacacgcagtagagatcgtggaagatcccgccactgttaccgcaggcaccgtaggagatacaaattttcgggtccggcgcggactgccacgcacgcagcgcaggggatcgcattgcacgggtgaccgcgccggtaaacagtaaaatatccgcatgacgcggactaggaacgactttaatgccgaagcgttctgcatcaaacagcgggctaagcgtggcgaaaatttcgatttcgcaaccgttgcagccgccgcagtccacgcggtaaacataggcagaacgtttgatttttttcagtaagctcgccttcatgctggcgatggattcatccaccgtcatggggaccggaatgccgttggcgtcacgggggcctaataaattgctcatcagatggcctctttcatatggcgagtcagttcaatacggtcggacggcaccaggcatttctggcgcttacattccgggcaagtctcaaagctttcgcggtggttttccgcgcggctgtcgccgttgtgcttaagcagcgcaatggcgtagtcgatctctttctggacggcgaaaggacgattgcagacgcggcagttgcacagcgcgaagcgggactgttgcaggaagtcttctttcttccacaccgccagttcgtactcttggctcagtttgatcgccgccgtcgggcagacttcttcgcagcgtccacagaagatgcagtgcccaagattaaactcccaggcaagctctcctgtggcgaggtcagtttcaaccgttaaggcgttactcgggcaggcattgacgcaggccgcgcagccgatgcactgctgcgggttctgctctggcttaccacggaagtttttatcaaccgcaatcggctccagcggataagagctggtcgccgtgccggttttgatgacttttttgataaaggtaaacatggcgattccttatttcagcgggctgtttttacgctcaatgctgtaacgctcgagttctttgtacggcaccactttgctcttcttcttacgcacatcgaccacggtcatgcggtcggtacaggagtagcaagggtcgaggctaccgataatcagcggcgcatcggaaacggtgttgccgcgcagcatgtagcgcagggtcggccagttcgcgtaggtcgcggcacggcagcgccagcggtacagcttctggttgtcgccggtcatgctccagtggatatcatcgccgcgcggcgcttcggcaaagcccagcgcaaagcggtgcggaatgtaggtaaagccttccaccatcagtgggccacccggcaggttatccagaccgtagtcgatcatgttcagcgcggtatagacttcgttgatacgcactttcagacgggaaataacgtcgcagccctgctcgctgtggacttccattggcagcaggccatagccgacaaacgggtgatcggcgcgggtatcacgggcgtgaccgctggcacggaccatcgggccgacgttactgaagtcgcgagcgatttccgggtccagacgaccaatgccgacagtgcgctgttccatgttcggagtgctcagcagcacatccaccagctcctgcacttcacgacgcatctgttgtgccagctggcgggtctggatcatgtcgtctttcagcagatcgcgacgaatcccgccgatcaagttcaggccgtaggttttacgcgcaccggtaaggatctctgccattttcatggaggtttcacgcacgcggaagaactgcataaagccggagtcgaagccggtaaagtgacaggccaggccaaggttgagcagatggctgtgcaagcgttctacctccagcagaatggcgcggatcatctgcgcacgttctggcacctgaatacccatcgcgttttccacgctcgtggtgtaggcggtgctgtgggcaaagccgcagatcccgcacacacggtcagagaggaaggtcacttcgttataacccatacgggtttccgccagtttttccatgccgcgatggacgtagaacagacggtagtcggcgtcgataatgttttcgccatcgacgaacagacggaagtggcccggttcatcagaagtgacgtgcagcggaccaatcggcacgacgttgtttttcttgtcgcccagttcgttgatgaactcgtaggtttcagcatcggtggtcggtgccggacgctgacgataatccatgctgtctttacgcagcggataaagttcatccggccagtcatccggcagcaccagacgacgttcatccggcagaccaaccggaatcaaaccgtacatatcgcgcacttcacgctcgccccacaccgccgccggaacgcgcggcgtcacggacggatattccggtttgttggcgtcaacttcgacgcgaaccgtaatccaacacttagtgcccttctccatgctcagcacgtagtaaacggcgtaatgaccattcagtttgcgttcgtcgttaccaaacagcacgctcagccagccaccctgtttgtagtaaagaaactccaccacttccggcaggtagttcacctttacggtgacagtcagctgatctttggtctgccaggcgtggtccagcacgacgcccggaaatgcctcattcagcgcggcgagataatgttgacctaatttttcttcagacatgctcaaactctctttaatcacgccgccagcaaggagacgaacgctaaaaatgcaaagccaaacccagcccaggtaatgcgcggagtaatatcaagacgcagacgggccatgctgttttcgaacagcgcgataaccaggacgccgaccaccagttttacgatggcaatcaccagcgccagcagcagtccaccggcggtgaaggtttccatttgtccccacggaataaacaccccgacgaacatctgcaacaccaccagctgtttcaggctgataccccatttcatgacgccaaagccgctgccgctgtattcagagagcgggccttcctgcagctcctgctcggcttccgccaggtcgaacggcagtttgcccatttcgataaaggtggcgaacgcacaggcacaaagcgccagtaccagcgggatgctctggctcagcggccagtgataaacggtgtcggtgatgttgctgatgttggtggaaccggcaacctgtgcggcaacccacagaccaagcagcagcatcggttcgaccagcacgccaagcatcgcttcacggctcgcgccgatagcggtaaacgggctaccggtatccagaccagaaatggcaaagaagaaacgcgcgatggcaaagagatacagtaaggtgatcaaatcacccagttgcggcagcggagaaccgacggtcaccaccggcagcgcagtagcgatagtcagcatgacgcccaccatcacatacggcgtcaggcggaacacccagccggaggcatccgggccgacgctctgacgccccagcagtttgataatgtcgcgatactcctgcaacacgcccggcccgcgacggttatgcaagcgggcgcgcgccacgcgggttataccggagagcagcggcgcaacggcaaataacaccagcgcctgaattaacggatataaaacactcattctcaggctcctcgactaacaataatcaccaccagtaccgccagttcaaccagcgccatccggcggaacagcaacgcactcccctcgcactgccagcccggcaccagagacaccggattcagccatttgcgtagtttcagcaccggcgcaaacgcctgtttcaccggcatggcaaaaccgtgagcggtaatcaccatacttttttcgtggtcgtaaccgcacacccaggccgcaccgcgggaacggcttggcaaacgatcgcctttgcaaatcgccataatgatgaatggcagcagcgggcaggcaatcagcagcaacgtgatcatcggttgagaaacggtggtgttagcaggctccagcggcagaggtacagcagcagagagcatcggcagtagccacggcgcagcaacaccgccaattacgcagcaaatcgccagtgccactacgcttacgctcatcaggagcggcgcacaggtggcgttttcggcttctttggtgcgcggcgcgccgaggaacgtgacgccatagactttcgccatacacatcaccgccagcgcaccggtaattgccagccccacagcgagcagcggccccagcagacgggcaacaaacgcgccactattgctcagtttgaaaaaactttgatagataacccattccccggcaaaaccattcagcggcggcagcgcagccattgccatcagcccgactaacatggcgatggagataaccggcattttcttgccaataccaccgagtttttcgatatcgcgatgaccggtacggaaccagacgctccccgccccgaggaacagtacgcttttgaacaggctatggttaagcagatggtacagaccaccgaccaggccaagagcaatcagcgccggttgttcgagcgcgatacccgttacgccagcgcccagccccagcaggatgatgccgatattttccagggtgtggtaagccagcaggcgctggatgttgtgctccaccagcgcatacagaccaccgacaaacgcggtgatcatgccgagcaccagcagcgcgatcccccaccacagcggtgcattaccgcccagcagactcagggttaaaatgcccagcaggccaattttcatgactaccgtagaaaacaacgcggcagctggcgcagaggcgttcgcatgtgcctgcggcacccagccgtgcagcggaataatcccggccagcaggccaaagccaatcactccgagcagccagatatcggaaccgagcggcagctgttgcatacgcatatccagcaggcgcagatccagcgtgccgtaacgctgccacagcagccagcaagcaatcgccagcagcagagtgccaagacgccccagcgcaaaccacagtttgccctctttgctgttgctggtgaggaacaccgcgcacagggccatgatttcggccattaccacgaacatgccgaggttgctggcaatgacggcgcagacggcggcagccatcaacatattgatctgcaagccgttgcacttcacctgcgcgtggcgatgccagtcaatgttgtagaggctgacaaacagaccgcacagaccgagcgtaatcagccaaatcgcgttaagcggagagatttgcacatcgtagcttaccaggctcagcgcaccgctcacgccaaccgcgccagtcagtacagtgaagcccgcggctgccgtatacagactaccaaccgcgccgccaattccagctatccagccacttaacgctttttgaaaagaaaagagaaatgccagaacagcggcggcgacaaaccacgccacgccgctattgatcagggaaattgcgctcatttagcctctccactttgagcctgctgaaacaaggtgagatcgccaaagtccgtgttaaaggtcagctcacgcttacgtttgctgacgcgggcgatatcggtgttatccaccagatgcagggctttagtcgggcacatccgcacgcaggccggaccttgttcatcaaagctacaaaggtcacatttgacggcgatcgcgcgaatacctggcacccagtcaagcaatgtgctgacacgcgccggagcaggcggtgccggtggcgctttcggggtattggcgtttgccggaatatccagcggacggctgccggaaaattcaattgcgccaaacgggcaggcgatgccgcacagcttgcagcttacgcacaggctttcattcaactgcacggccccatcgacgcgggtgatggcgttaaccgggcagaccaccgcgcagggtgcatcttcacagtggtgacagagctgcggcgcagattctttttcattcagcatcactctcaggcgcggcatactttgcaggccgtgctggcgatgcgtctcactacaggcggcctcacaagtgtggcagccgatacagagcgtggagtcagcaattacaaaacgattcaccaggcattcctcaggtgattgtcatttttgacgaaaacatgccgatgaaatgtcattttcgacactcatcgacacgcccatccccaaacaggcgtaacgcctgcaaaacgggcaaagcctcagctcatgctgccgggctttgtccctttaccagttggcttaaattcaccggcacattgttttcaatagcggtgtataagctgtcgtaaacgccagcgattttttcgagatagtgttccagaacctgttcgcgatcgcggatgttgaccttgccatcaatcatgccgtcaatgctcagttgcgcctgcgcaatccgctgtttgtcttcgccatcttttgtttcgacgtaatactcgatggtgtggctgttaaagccatccgccagggtgacgtaaatgcgaaaatgttcaaaaaggacgaaacagagttctttgtccggcgcgcagctcatggcgtgatgcaggcgcgctttgcttaacgtgatcccctgaaccaggctattgcagtagatgtgccactggtcctgtaggcgacgatgccgctgtgcgatgtaatcggctttctcgcttatttcccaaatagtcattgtcaggttacccgtttaacagagatgccagctttaagcattttttgtgccaacttttaatttattgttattaaagagatttttaagctaaagatgaatttcgtcgccgtgtcgacgtgtcatttcgacatcatcgacattattcaccgcagggataatcaacactggcacaattattgcttgtagctggcaatagttaatgggaggcgatatgcacgaaataaccctctgccaacgggcactggaattgatcgaacagcaggccgcaaaacacggcgcaaaacgcgtaactggggtctggctcaaaattggcgcattttcttgtgtcgaaaccagctctcttgccttttgttttgatctggtttgccgcggcagcgtggcggaaggttgtaaactgcacctcgaagaacaagaggccgaatgctggtgtgaaacatgccaacagtatgtgacgctactgacccagcgcgtccgccgctgtccacagtgtcatggtgacatgctgcagattgtggcagacgacggtttacagattcggcggatagaaatagaccaggagtgagcgatgtgtacaacatgcggttgcggtgaaggcaacctgtatatcgagggtgatgaacataaccctcattccgcgtttcgtagcgcgccatttgccccggcggcacgcccgaagatgaaaatcaccggcattaaagcgcctgaatttacccccagccagactgaagaaggcgacctgcattacggtcatggcgaagcgggcactcacgcaccgggcatgagccagcgtcggatgctggaagtcgaaattgacgtgctggacaaaaataaccgtctggctgaacgcaaccgcgcgcgctttgctgcccgcaagcaactggtgctcaacctggtttccagccctggttccggtaaaaccaccctgctgacggaaaccctaatgcgcctgaaagacagcgttccgtgcgcagttattgaaggcgaccagcaaaccgtgaacgatgccgcacgcattcgcgctaccggcacaccagcgattcaggtgaacaccggtaaaggctgccatcttgacgcacagatgattgccgacgccgcaccgcgtctgccactggacgataacggtattctgtttatcgaaaacgttggcaacctcgtatgcccggccagcttcgatctcggtgaaaaacacaaagtggcggtgctttccgttaccgaaggtgaagacaaaccactgaaatatccgcatatgtttgccgccgccagcctgatgctgctcaacaaagttgacctgttgccgtatctcaactttgacgttgaaaagtgcatcgcctgcgcccgcgaagtcaatccagaaattgaaatcatccttatttccgccaccagcggcgaagggatggaccagtggctgaactggctggagacacagcgatgtgcataaggtaaaactggctggagacacagcgatgtgcataggcgttcccggccagatccgcaccattgacggcaaccaggcgaaagtcgacgtctgcggcattcagcgcgatgtcgatttaacgttagtcggcagctgcgatgaaaacggtcagccgcgcgtgggccagtgggtactggtacacgttggctttgccatgagcgtaattaatgaagccgaagcacgcgacactctcgacgccttacaaaacatgtttgacgttgagccggatgtcggcgcgctgttgtatggcgaggaaaaataatgcgttttgttgatgaatatcgcgcgccggaacaggtgatgcagttaattgagcatctgcgcgaacgtgctagtcatctctcttacaccgccgaacgccctctgcggattatggaagtgtgtggcggtcatacccacgctatctttaaattcggcctcgaccagttactgccggaaaacgttgagtttatccacggtccggggtgcccggtgtgcgtactgccgatgggtagaatcgacacctgcgtggagattgccagccatccggaagtcatcttctgtacctttggcgacgccatgcgcgtgccggggaaacagggaagcctgttgcaggcaaaagcacgcggtgccgatgtgcgcatcgtttacagcccgatggatgcgttgaaactggcgcaggagaatccaacccgcaaagtggtgttcttcggcttaggttttgaaaccactatgccgaccaccgctatcactctgcaacaggcgaaagcgcgtgatgtgcagaatttttacttcttctgccagcacattacgcttatcccgacgttgcgcagtttgctggaacagccggataacggtatcgatgcgttcctcgcgccgggtcacgtcagtatggttatcggcaccgacgcctataattttatcgccagcgattttcatcgtccgctggtggttgctggattcgaaccccttgatctactacaaggcgtggtcatgctggtgcagcagaaaatagcggcccacagcaaggtagagaatcagtatcgtcgagtggtaccggatgccggtaacctgctggcgcaacaggcgattgccgatgtgttctgtgtcaacggcgacagcgaatggcgcggcttaggcgtgattgaatcttctggcgtgcacctgacgccggattatcaacgattcgatgccgaagcacatttccgcccggcaccgcagcaggtctgcgatgacccgcgcgcgcgttgtggtgaggtattaacgggcaaatgtaagccgcatcaatgcccgctgtttggtaacacctgtaatcctcaaaccgcgtttggtgcgctgatggtttcctccgaaggagcgtgcgccgcgtggtatcagtatcgtcagcaggagagtgaagcgtgaataatatccaactcgcccacggtagcggcggccaggcgatgcagcaattaatcaacagcctgtttatggaagcctttgccaacccgtggctggcagagcaggaagatcaggcacgtcttgatctggcgcagctggtagcggaaggcgaccgtctggcgttctccaccgacagttacgttattgacccgctgttcttccctggcggtaatatcggcaagctggcgatttgcggcacagccaatgacgttgcggtcagtggcgctattccgcgctatctctcctgtggctttatcctcgaagaaggattgccgatggagacactgaaagccgtagtgaccagcatggcagaaaccgcccgcgcggcaggcattgccatcgttactggcgatactaaagtggtgcagcgcggcgcggtagataaactgtttatcaacaccgctggcatgggcgcaattccggcgaatattcactggggcgcacagacgctaaccgcaggcgatgtattgctggtgagcggtacactcggcgaccacggggcgactatccttaacctgcgtgagcagctggggctggatggcgaactggtcagcgactgcgcggtgctgacgccgcttattcagacgctgcgtgacattcccggcgtgaaagcgctgcgtgatgccacccgtggtggtgtaaacgcggtggttcatgagttcgcggcagcctgcggttgtggtattgaacttagtgaagcggcactgcctgttaaacctgccgtgcgtggcgtttgcgaattgctgggactggacgccctgaactttgccaacgaaggcaaactagtaatagctgttgaacgcaacgcggcagagcaagtgctggcagcgttacattcccatccactggggaaagacgcggcgctgattggtgaagtggtggaacgtaaaggtgttcgtcttgccggtctgtatggcgtgaaacgaaccctcgatttaccacacgccgaaccgcttccgcgtatatgctaataaaattctaaatctcctatagttagtcaatgaccttttgcaccgctttgcggtgctttcctggaagaacaaaatgagttatacaccgatgagtgatctcggacaacaagggttgttcgacatcactcggacactattgcagcagcccgatctggccagcctgtgtgaggctcttagccaactggtaaagcgttctgcgctcgccgacaacgcggctattgtgttgtggcaagcgcagactcaacgtgcgtcttattacgcgagccgtgaaaaagacacccccattaaatatgaagacgaaactgttctggcacacggtccggtacgcagcattttgagccgccctgatacgctgcattgcagttacgaagaattttgtgaaacctggccgcagctggacgcaggtgggctatacccaaaatttggtcactattgcctgatgccactggcggcggaagggcatatttttggtggctgtgaatttattcgttatgacgatcgcccctggagcgaaaaagagttcaatcgtctgcaaacatttacgcagatcgtttctgtcgtcaccgaacaaatccagagccgcgtcgttaacaatgtcgactatgagttgttatgccgggaacgcgataacttccgcatcctggtcgccatcaccaacgcggtgctttcccgcctggatatggacgaactggtcagcgaagtcgccaaagaaatccattactatttcgacattgacgatatcagtatcgtcttacgcagccaccgtaaaaacaaactcaacatctactccactcactatcttgataaacagcatcccgcccacgaacagagcgaagtcgatgaagccggaaccctcaccgaacgcgtgttcaaaagtaaagagatgctgctgatcaatctccacgagcgggacgatttagccccctatgaacgcatgttgttcgacacctggggcaaccagattcaaaccttgtgcctgttaccgctgatgtctggcgacaccatgctgggcgtgctgaaactggcgcaatgcgaagagaaagtgtttaccactaccaatctgaatttactgcgccagattgccgaacgtgtggcaatcgctgtcgataacgccctcgcctatcaggaaatccatcgtctgaaagaacggctggttgatgaaaacctcgccctgaccgagcagctcaacaatgttgatagtgaatttggcgagattattggccgcagcgaagccatgtacagcgtgcttaaacaagttgaaatggtggcgcaaagtgacagtaccgtgctgatcctcggtgaaactggcacgggtaaagagctgattgcccgtgcgatccataatctcagtgggcgtaataatcgccgcatggtcaaaatgaactgcgcggcgatgcctgccggattgctggaaagcgatctgtttggtcatgagcgtggggcttttaccggtgccagcgcccagcgtatcggtcgttttgaactggcggataaaagctccctgttcctcgacgaagtgggcgatatgccactggagttacagccgaagttgctgcgtgtattgcaggaacaggagtttgaacgtctcggcagcaacaaaatcattcagacggacgtgcgtctaatcgccgcgactaaccgcgatctgaaaaaaatggtcgccgaccgtgagttccgtagcgatctctattaccgcctgaacgtattcccgattcacctgccgccactacgcgagcgtccggaagatattccgctgctggcgaaagcctttaccttcaaaattgcccgtcgtctggggcgcaatatcgacagcattcctgccgagacgctgcgcaccttgagcaacatggagtggccgggtaacgtacgcgaactggaaaacgtcattgagcgcgcggtattgctaacacgcggtaacgtgctgcagctgagtttgccagatattgttttaccggaacctgaaacgccgcctgccgcaacggttgtcgccctggagggcgaagatgaatatcagttgattgtgcgcgtgctgaaagaaaccaacggcgtggttgccgggcctaaaggcgctgcgcaacgtctggggctgaaacgcacgaccctgctgagtcggatgaagcggctgggaattgataaaagcgcattgatttaactgcaaattgccggacagatctgcctgtccggcatattattcatgaggttttttcggacgatatttttccggcagttctggcaccggacgcttgtcatcgatgagatgacgcacggttaagatcggatgacgccacagcattctcggcccggcccaacgcataatctgtttcatctcttcacgctttgcaggctggtaacagtgcaccggacactgcttacaggctggtttctcttcgccgaacacacatttatccagccgcttttgcgcgtaaacaaacaacgcctcgtaatgctccggctccgcactcgcctgcgggcatttcgcttgataaagatcgatcatttttttaatcgtcagtttttcacgagagatacgcttgccggacatgctgcctccacctcattaagatgtatttatattacatcttaatcttaaagggcactatgactccaaagaagaagggttagccaaccgatacaattttgcgtacttgcttcataagcatcacgcaaaagctgcaaaacagcatctttcccggaaccagcatcaagaactcgccgttcgcttcttcccctgaaatgattaactccggtatcatgtgcgccttatgtgattacaacgaaaataaaaaccatcacaccccatttaatatcagggaaccggacataaccccatgagtgcaatagaaaatttcgacgcccatacgcccatgatgcagcagtatctcaggctgaaagcccagcatcccgagatcctgctgttttaccggatgggtgatttttatgaactgttttatgacgacgcaaaacgcgcgagccaactgctggatattagtctgaccaaacgcggtgctagcgcgggagagccgatcccgatggcggggattccctaccatgcggtggaaaactatctcgccaaactggtgaatcagggagagtccgttgccatctgcgaacaaattggcgatccggcgaccagcaaaggtccggttgagcgcaaagttgtgcgtatcgttacgccaggcaccatcagcgatgaagccctgttgcaggagcgtcaggacaacctgctggcggctatctggcaggacagcaaaggtttcggctacgcgacgctggatatcagttccgggcgttttcgcctgagcgaaccggctgaccgcgaaacgatggcggcagaactgcaacgcactaatcctgcggaactgctgtatgcagaagattttgctgaaatgagcttaattgaaggccgtcgcggcctgcgccgtcgcccgctgtgggagtttgaaatcgacaccgcgcgccagcagttgaatctgcaatttgggacccgcgatctggtcggttttggcgtcgagaacgcgccgcgcggactttgtgctgccggttgtctgttgcagtatgcgaaagatacccaacgtacgactctgccgcatattcgttccatcaccatggaacgtgagcaggacagcatcattatggatgccgcgacgcgtcgtaatctggaaatcacccagaacctggcgggtggtgcggaaaatacgctggcttctgtgctcgactgcaccgtcacgccgatgggcagccgtatgctgaaacgctggctgcatatgccagtgcgcgatacccgcgtgttgcttgagcgccagcaaactattggcgcattgcaggatttcaccgccgggctacagccggtactgcgtcaggtcggcgacctggaacgtattctggcacgtctggctttacgaactgctcgcccacgcgatctggcccgtatgcgccacgctttccagcaactgccggagctgcgtgcgcagttagaaactgtcgatagtgcaccggtacaggcgctacgtgagaagatgggcgagtttgccgagctgcgcgatctgctggagcgagcaatcatcgacacaccgccggtgctggtacgcgacggtggtgttatcgcaagcggctataacgaagagctggatgagtggcgcgcgctggctgacggcgcgaccgattatctggagcgtctggaagtccgcgagcgtgaacgtaccggcctggacacgctgaaagttggctttaatgcggtgcacggctactacattcaaatcagccgtgggcaaagccatctggcacccatcaactacatgcgtcgccagacgctgaaaaacgccgagcgctacatcattccagagctaaaagagtacgaagataaagttctcaccagtaaaggcaaagcactggcactggaaaaacagctttatgaagagctgttcgacctgctgttgccgcatctggaagcgttgcaacagagcgcgagcgcgctggcggaactcgacgtgctggttaacctggcggaacgggcctataccctgaactacacctgcccgaccttcattgataaaccgggcattcgcattaccgaaggtcgccatccggtagttgaacaagtactgaatgagccatttatcgccaacccgctgaatctgagcccgcagcgccgcatgttgatcatcaccggtccgaacatgggcggtaaaagtacctatatgcgccagaccgcactgattgcgctgatggcctacatcggcagctatgtaccggcacaaaaagtcgagattggacctatcgatcgcatctttacccgcgtaggcgcggcagatgacctggcgtccgggcgcagtacctttatggtggagatgactgaaaccgccaatattttacataacgccaccgaatacagtctggtgttaatggatgagatcgggcgtggaacgtccacctacgatggtctgagcctggcgtgggcgtgcgaggaaaatctggcgaataagattaaggcattgacgttatttgctacccactatttcgagctgacccagttaccggagaaaatggaaggcgtcgctaacgtgcatctcgatgcactggagcacggcgacaccattgcctttatgcacagcgtgcaggatggcgcggcgagcaaaagctacggcctggcggttgcagctctggcaggcgtgccaaaagaggttattaagcgcgcacggcaaaagctgcgtgagctggaaagcattagcccgaacgccgccgctacgcaagtggatggtacgcaaatgtctttgctgagtgtaccagaagaaactagccctgcggtcgaagctctggaaaatcttgatccggatagtctcaccccgcgtcaggcgctggagtggatttatcgcttgaagagcctggtgtaataacaattcccgatagtcttttgctatcgggaatattaacgacaactgacgaataaaataaaaacaccctgtataataggaaagcttattttacagggtaaaaccatgccatctacacgctatcaaaaaatcaatgcccatcactatcgccatatatgggtcgttggtgatattcatggtgaatatcagttattacaatcccgcttacatcaactctcttttttccccaaaatcgacttacttatttctgtcggcgataatattgatcgtggaccggagagtcttgacgtcctgcgcctgctaaaccaaccctggtttacgagcgttaaaggcaaccacgaagcgatggcgcttgaggcattcgaaactggcgatggcaatatgtggcttgccagcggtggtgactggtttttcgatttaaatgatagtgagcaacaagaggcaatagatctgttgctgaaattccatcaccttccacatattattgaaatcactaacgacaacataaaatatgccatcgcacatgcagattatccggggagtgaatatctctttggtaaagaaatagcggagagcgaattactctggcctgttgatcgtgtgcagaaaagccttaatggcgagttacaacaaataaacggcgctgattattttatatttggacatatgatgtttgataacattcagacgttcgctaaccagatttatattgataccggaagcccgaacagcgggcggctgagtttttataaaataaagtaatctcatgcttcttctgtgaagcatgagtaacccggtgttattgcaggccattattcatttttcgctaccagcaaagagagatcctgcttcaccagcgcgcgactggcactctccggcaaaccgtcgtctgtaataatctgatcaaactcgcttaatggtaacgccagccatgtcgccacctgaccatatttcgtcgcatcacagaccaaaactcgctggcggctggcactggcaatcgcccgtttcaccgtgactttatcttccgctggcgtagaaatcccccgcacactccaactgcttgcagaaataaaagcctgatcaatcatcaggctgcgcagcatggtcgcagcggcttccccgacacaggaacggttttcccgacacactgcaccgccagtgtgaataattgtgcaattactgttgtcgagcaagtagtccgcaataacgaaatcgtttgtgaccacagtcagactctccatgtgaatcagatgctgtgctatcgctaacgtggtcgttcccgcatccagatagatacaacttcccggctgaacaagacttgccgccagcttgccaatagccgctttttgcgtcattgccagcgcagtttttacctgatgagaaggttcatgcgccacgcgtcccggagactggacgcctccggacaccagcacaacggctccctgctgctccagtttttgtaaatcccgacgaatggtcatatgactcacattcattctgtccgttagttcagcaatactgacaatgcctttttcagctaccatctcaaggatgatttggcgacgctctacgggtatcaacttttgctccttcctttgtcctgcactcattctacgctatttgcctgcgaaacgtgcgcggcgcaactaacgcttagttcacataaaataacacacaatgttaatttatgtgaatcagatcaccataccgttatcttccagcgcttatattcacaatatcaaacaaaatatcacttaaattaacaaggagagcagatgaaaacgggatctgagtttcatgtcggtatcgttggcttagggagtatgggaatgggagcagcactgagttatgtccgcgcaggtctttctacctggggcgcagacctgaacagcaatgcctgcgctacgttgaaagaggcaggtgcttgcggggtttctgataacgccgcgacgtttgccgaaaaactggacgcactgctggtgctggtggtcaatgcggcccaggttaaacaggtgctgtttggtgaaacaggcgttgcacaacatctgaaacccggtacggcagtaatggtttcttccactatcgctagtgctgatgcgcaagaaattgctaccgctctggctggattcgatctggaaatgctggatgcgccagtttctggtggtgcagtaaaagccgctaacggtgaaatgactgtcatggcctccggtagcgatattgcctttgaacgactggcacccgtgctggaagccgttgccggaaaagtttatcgcataggtgcagaaccgggactaggtagcaccgtaaaaattattcaccagttgttagcgggcgtacatattgctgccggagccgaagcgatggcacttgcagcccgtgcggggatcccgctggatgtgatgtatgacgtcgtgaccaatgccgccggaaattcctggatgttcgaaaaccggatgcgtcatgtggtggatggcgattacaccccgcatagtgccgtcgatatttttgttaaggatcttggtctggttgccgatacagccaaagccctgcacttcccgctgccattggccagtacagcattgaatatgttcaccagcgccagtaacgcgggttacgggaaagaagacgatagcgcagttatcaagattttctctggcatcactctaccgggagcgaaaagttgagctaaactctaccgggagcgaaatcatgatcaagattggcgttatcgccgatgattttaccggcgcgacggatatcgccagttttctggtggaaaacggtctaccaacggtacaaattaacggtgttccaacaggtaaaatgccggaagcaatcgacgcactggtgatcagcctgaaaacgcgctcctgtccagtggttgaagccacacagcaaagcctggcggctctgagctggttgcaacagcaaggttgcaaacagatctatttcaaatactgctctactttcgacagtacggcgaaaggtaatattggcccggttaccgatgccttaatggatgctctcgacacgccgtttacggtcttctctccggccctgccggtcaacggacgtacggtttatcaggggtatttgttcgtaatgaatcaactgctggccgaatccgggatgcgccatcacccggtaaatcccatgaccgacagctatcttccccgtctggttgaagcgcaatccacagggcgctgcggcgtcgttagcgcacatgttttcgaacaaggtgtggatgccgttcgtcaagagctggctcgcttacagcaagagggctaccgctacgcggtgcttgatgcgctgaccgaacaccatctggaaattcagggagaagccttgcgcgatgccccactggtaacgggcggttctggtctggcgattggcctggcccggcagtgggcgcaagaaaacggtaaccaggctcgcaaagcagggcgtccgctcgctgggcgcggcgtagtgctctccggtagttgctctcaaatgaccaaccgccaggtagcacattaccgtcaaattgcaccagcccgtgaagttgatgtggcacgctgcctcagtattgaaactctggccgcttatgcacacgaactggcagagtgggttctgggccaggaaagtgtacttgctccactggtttttgccaccgccagcactgacgcattggcagcaattcaacagcaatacggtgcacaaaaagccagtcaggcagtagaaacactgttttctcaactagcggcgcggttagcagcggaaggcgtgacacgctttattgtcgcaggcggtgagacctccggcgtagtcacacagagcctgggaataaaagggtttcatattggcccaaccatttccccggcgtgccgtgggtaaacgcactggataagcctgtctcactcgcccttaaatctggcaacttcggtgatgacgcctttttttcacgagcccaaagagagtttttatcatgagcgatttcgcaaaagtagagcagtctttgcgagaggagatgacgcggattgccagtagtttctttcagcgcggctatgcaaccggtagcgctggcaatctgagcctgcttttacctgacgggaatttactggcgacaccgacaggtagttgcctgggcaatctcgatccgcagcggctttccaaagtcgccgcggatggcgaatggttaagtggtgacaaacccagcaaagaggtgctctttcatctggcgctgtatcgcaacaatccgcgctgtaaagcggtggtgcatttgcacagcacatggagcacggcgctttcctgcctgcaagggctggacagcagcaacgttattcgtccgttcacaccatacgtggtgatgcggatgggaaatgtcccgctggtgccttattaccgaccgggcgataaacgcatcgcacaggatctggcggaactggcagcagacaatcaggcttttttactggcaaatcatggcccagtggtttgcggtgaaagcctgcaagaagccgccaacaatatggaagagctggaggaaacggcaaagctgatttttattctcggtgaccgcccgatccgttatctgaccgcaggtgaaattgcggaattaaggagttaatgcaatgcctcgttttgcagctaatttatccatgatgttcaccgaagtgccttttattgaacgcttcgccgcagcgcgaaaagccgggttcgatgctgtggaatttctgtttccctataactactccaccctgcaaatccaaaagcaactggagcaaaaccatctgacactggcgctgttcaataccgctcccggagatattaatgcgggggaatggggattatccgcccttcccggacgtgagcacgaagcacacgcagacatcgacctggcactggaatatgcattggcgctcaattgtgaacaagtccatgtgatggcaggcgtcgtgcccgctggcgaagatgctgaacggtaccgggcagtatttatcgataatatccgctacgctgccgaccgctttgcgccacacggcaagcgaatattagttgaagcactcagccccggcgttaagcctcattatctcttctccagccagtatcaggcactggctattgttgaagaggttgcgcgagataacgtgtttattcaactagatacttttcatgcgcaaaaagtagatggcaacctgacgcatttaatccgcgactacgccgggaaatatgcgcacgtacaaattgccggactacctgatcgacatgaaccggacgatggagaaatcaactatccgtggctgttccgcctgttcgatgaggtgggatatcagggctggatcggttgtgaatataaacctcgtggcctcaccgaagaagggcttggctggtttgacgcctggcgctaattcgttaaatccctaattacaacgtacccatacatccccccatctacggatggggtaggttaactataactttcagacagggtttcccatgtccacaattacattgttatgcattgcgttagctggcgtaatcatgctgttgctgctggtcatcaaggcaaaggtacaaccattcgttgctttgctcctcgtcagcctgttagtcgcacttgcggcaggtataccggcgggcgaagtgggtaaagtgatgatcgccgggatgggcggtgtgcttggttccgtcactattattattggtctgggcgctatgctggggcgtatgatcgaacactctggtggtgcagagagtctggctaattatttcagtcgcaagttaggtgacaaacgaactatcgctgcgctgactctggcagcgttcttcctcggtattcccgtcttctttgatgtcggctttattattcttgcgccaatcatttacggttttgccaaggttgccaaaataagcccactcaaatttggcctgcctgtcgctgggatcatgctcactgttcacgtggcggtaccgccgcatccaggccctgtcgccgcagcggggttactccacgcagacatcggctggctaaccatcatcggtattgcgatttctattcccgtaggggttgttggctactttgcagcgaaaataatcaataagcgccaatatgcgatgagtgtagaagtactggaacagatgcaactggctccggccagtgaggaaggcgcgacaaaattaagcgataaaataaatccaccgggcgtcgcgctggtcaccagcctaattgttattcctatcgcgattatcatggcgggtacggtttccgcaacactgatgccgcctagccatcccctgcttggtacgctacagctgatcggcagtccaatggtagctctaatgattgcgctggtgctggcattctggttattggctttacgtcgcggctggagcttacaacacaccagcgacattatgggcagtgcgcttcctactgcggcggtagtgattttggttactggtgctggaggggtatttggcaaagtgctggtggaaagcggcgtcggcaaagcccttgccaacatgctacaaatgattgacctgcctctgttaccagccgcatttattattagtctggcgctgcgtgcaagccaggggagtgcaaccgtagcaatactgacaaccggcgggttactcagtgaagcggtgatgggattgaatccgattcagtgcgtattggtgacgctggcagcctgctttggtgggcttggtgcgagtcatattaatgacagtgggttctggattgtgaccaaatatctggggttgagcgtagcagacggtctgaaaacctggacagtgttaacgaccattctcggttttaccggattcttaattacctggtgcgtatgggcggtaatttgaccttaataaaaaggtccgatgggcatcggaccttttattgtgcacagaaaaggccagcctcgcttgagactggcctttctgacagatgcttacttactcgcggaacagcgcttcgatattcagcccctgcgtttgcaggatttcgcgcaaacggcgcaggccttcaacctgaatctggcgaacacgttcacgggtgaggccaatttcacgacctacatcttccagtgttgccgcttcgtaccccagcaaaccgaatcgacgtgccagcacttcacgctgtttggcgttcagctcgaacagccatttgacgatgctctgcttcatatcgtcatcttgcgtggtatcttccggaccgttctctttttcatcggccaggatgtccagcaacgctttttcggaatcaccacccagcggggtgtctacgctggtaatgcgctcgttaagacgaagcatacggctgacgtcatcaactggcttatccagttgctctgcgatctcttccgcacttggttcatggtccagcttatgggacaactcacgtgcggttcgcaggtaaacgttcagctcctttacgatgtgaatcggcaaacgaatagtacgggtttggttcataatcgcccgttcaatcgtctggcgaatccaccaggttgcgtatgtactgaagcggaaaccacgttccgggtcaaacttctctaccgcgcggatcagccccaggttgccctcttcgataaggtccagcaacgccagaccacgattgccataacggcgggcaatttttaccaccagacgcaagttactctcgatcatccggcggcgagaggcgacatctccacgcagtgcgcgacgcgcaaaataaacttcttcttcggccgttaacagtggactataaccaatctcaccaaggtaaagctgagtcgcgtccaacacacgctgtgtggctccctggcttaacagttcctcttcggccaaatcgttatcactgggttcctgttctactaaggccttttcgtcaaaaacctcaactccgttctcatcaaattccgcatcttcatttaaatcatgaactttcagcgtattctgactcataaggtggctcctacccgtgatcccttgacggaacattcaagcaaaagcctggttccgccgatttatcgctgcggcaaataacgcagcgggtttacggatttccccttgtaacgaatttcaaaatgcaagcgtgtactactggttccggtgctacccatggtcgctattttttgccccgccttaacttcttgttgttcccggaccagcattgtgtcgttatgggcgtaggcactcaggtaatcatcattatgtttgatgataatcagattaccgtagccgcgcagcgcgttaccagcataaacaacgcggccatctgcggtcgcgataattgcctgtcctttgctgcctgcgatatcaatccccttgttgcccccctcagaagcgccaaaggtttcgatcactttgccctcagtcggccagcgccaggtggagataggcgtactggtacttgtactgctgacagtcggctcggttgtgcttgctgttggtaccgttacaggcgctgtgaccgtggtcgcagttggcttgttgttcggcaacattttgttagcactctgttcaccgctagactcagaatacgtaattgtcggttggctcgcaacagcaacggtggaattttgtgcaggcttgatcacaactccttgctctgctgcgtcggcctgggtaatggcatttccgccagtgattggcgtaccggaagcattacccacctgcaaggtctgaccaacgttcagcgcgtatggtgcctgaatattgttgcgctgagcaaggtcacggaaatcgttgccagtaatccaggcgatatagaaaagtgtgtcgccttttttcacggtataggtactgccgctataactgcctttcggaatgttcccatactgacggttatagacgatgcgtccgttttccatctgtaccggctgctgagctactggctgcactggctggatttgcggttgttgagtagcctgaatttgtggctgctgcaccggctgaatttgcggttgctgcgctgtagacgtcgtccccattttcggcggcggcgtaatcaacataccagaattagtatttgcaggcgcattgccattaacggagctgaccggtgccggtggattactagtgtcagaacagcctgccagccataggctaaccagactcaaagccgcaatgcggcgaacggtgaattttgggcttcccgcgctcatttatcccccaggaaaaattggttaataaccagtgacataattaccgtgcaaggcaccctactgaacactggaaaagatgttcacgatacgctgacctgcggcaaaataaccaggaaaaatccaggtatttcctcacgttttaagccagctcacccttcactaaagggacaaagcgcacggcctccacggtatcgataataaattcgcctccccgacgacgcacccgtttcaaatactggtgctcctcccctacgggtaagacgagaatcccgccttcgtccagctgcgtcattagcgcagttggaatttccggcggtgccgccgtaacaatgatagcgtcaaacggcgcacgtgcctgccaaccttgccatccatcgccatgacgggtactaacattatgtaaatcaagatttttcaggcggcgacgtgcctgccactgcaagcctttaatccgttcaacgctgcaaacatgctggacaagatgcgccaggattgccgtttgatatccgctaccggtgccaatttccagcacccggctctgcggcgtcagctcgagtaattcggtcattcgcgccaccatatatggctggctaattgtctgcccctgacctatcggcaaagcgatattgtcccaggctttttgttcaaacgcttcatcaacgaatttttcacgcggcacggcggcaagtgcattcagcacctgctcatcctgaataccttgcgcacgtaattgatccagaagtgcttgtacgcgtctgcttaccattgcgtgccaactcccacgctgtttaaccagtcactaaccacatcttgcgcgctatgcgcagttaaatccacatgcagcggcgtgatggagacatagccctcatctaccgcagcaaaatcggtccccggaccagcatcacatttaccgcccggcgggccaatccagtacagcgtattgccgcgcggatcttgctgcgggatcacctgatctgccggatgtcgtgtaccgcagcgcgtcacgcgaatacctttgatttgatccaagggtaaatccggaacgttaatattaagaatacgcccggtgcgcagcggctctttacacagtgcgcgcaaaatactacaggttaccgccgcggcagtgtcgtaatgtttatgcccgtcaaggctgacggcaagcgccggaaaacctaaatgacggccttccatcgcggcggctaccgtaccggaataaataacatcatcccccagattcggcccggcgttaattccggacacaacaatgtccgggcgcggacgcatcagagcattcacgccaagatagacgcaatcggtcggggttcccatttgcacagcaatatcaccattttcaaaggtaaacgtgcgcagggaggattccagtgtcagagaattactagcgccgctgcggttacgatcgggggcgaccacctgaacgtcagcaaactcacgcaaggctttcgccagcgtttgtataccgggtgcatgtaccccgtcatcattactcagcaatatgcgcataatcacctgttgtgttgataagttccctgacaacgctggttgcaaaactacccgccggaagccagaaacggatctctacggtgacgtcatcccaccaattccagcttaattgttgcggatacagcagcatcgctctgcgcgcggcttcaactttttcgcgcaccagtaaagcttgtaattcagtttctgcggcgacagctgcttgttcgaatgccagcgcttcacgctgagttccccattcgccactgcctggcaatgcggcggttatcatcaactctttatcgttgacgcgacgctgtaattccgccagttcttcggtggttgcgacaaaccagctaccacgtccggctaattgtagcgcatcgccgtcaacaacttgattaacgtctgcttttttgaggcgctcagcaacaatctgattaaacaacgcactgcgggctgcgctcaaccaaaaactccgtttattgcgatcgcgcaccggagtattggtttgcgcccagcgctgcgccccctgcaagttgctaccgccaatcccaaaacgttgggcaccgaagtagttcggtacaccttttacgcaaatatcgatcagacgttgttcaacgtcatcgcgattgctcacttcgcgcagaaccagggtaaaggcgttacctttcagcgcgcctaaacgcagcttgcgcttgtgccgcgcatactccagcacctggcagccttccagttgaaaggcgctcagatcgggcatttccttgcccggcacgcgagcgcataaccactgttccgtaacagcatgtttgtctttttgcccagcgaagctgacttcacgggcatgaattttcaggaatttcgccagtgcatccgccacaaaacgggtattgcagccgtttttgaggattctaaccagaatatgctcaccttcaccatcaggctcaaagcccaaatcttccaccaccacaaagtcttccggattggctttcagcagcccggtgccttgcggtttaccgtggaggtaagtgagattatcaaactcaatcattttgttgccttaatgagtagcgccaccgcttcacaggcaatcccttccccacgtccggtaaatcccagtttttccgtagtagtggctttcacgttaacatcatccatatggcagccgagatcttcggcaataaacacgcgcatttgtggaatgtgcggcaacatcttcggtgcctgagcgatgatagtgacatcgacgttgccaagggtataacccttcgcctgaatacgacgccaggcttcgcgtagcagctcgcggctatcggcacctttaaatgccggatcggtatccgggaacagcttgccgatatcccccagcgccgccgcgccaagcaatgcatcggtcaacgcatggagcgccacgtcgccatcagaatgcgccagcaatcctttttcgtaaggaatgcgtacgccaccaatgataattgggccttcaccgccaaaggcatgtacgtcaaaaccgtgtccaattcgcattatgtattctcctgatggatggttcgggtgaggtaaaactcggccagtgccaaatcttccgggcgcgtgactttaatgttatccgcacggccttcgaccaactgaggatggaatccgcaatattccagcgcgctggcttcgtcggtaatagtcgcgccttcatttagagcgcgcgtcagacagtcatgtaacagctcacgagggaaaaattgcggcgtcagcgcgtgccataagccgttgcgatcaacggtatgagcaatggcatttttgcccggttcggcacgtttcatagtatcgcgcactggtgcggcgaggatcccccccgtgcggctggtttcgctcaacgccaacaatcgcgcgaggtcatcctgatgcaaacaaggacgagcggcgtcatgcaccaatacccactgcgcgtcgccagcggctttcagacctgccagcacggaatcggcacgctcatcaccgccatctacaacggtgatttgcggatgattcgccagaggaagttgtgcaaaacggctatcgccaggacttatggcaatgacgacacgtttcacccggggatgcgccagcagcgcatgcacgctgtgttcaagaatggtttgattaccgatactgagatattgcttaggacattccgtttgcattcgacggccaaatccggccgccggaaccacggcgcaaacatccaaatgagtggttgccatgttaattcccgggctgatttatcgattgttttgccccgcagactgtgcgcgcttgctcgcgtcaggcaccagacgataaaaagtttcgcccggcctggtcatgctgagttcattacgcgcacgctcttcgagcgcctcctggccgccattgagatcgtcaatttcggcaaaaagttgatcgtttcgcgctttaagtttcgcgtttgtagcttgctgtgccgccacatcatcattgacgcgggtatagtcatgtataccgttcttaccgaaccacaggctatactgtagccagaccagaatagccagcaacagcagcgttagtttacccatcctgccccctgaaaaacggcatcatcatcccatgcatccgaagacgactctacatcctctgttggggataccgcgacaacgcgggcaaatgtaccacatttgtccattgttacgtatacccagggcgtgcagaacataatctcattattagttacggtttgaattatgaacagaggagacgggaaagtacaaattagcccagtagccacataaacagtgcgccaaacataatgcctactgtcaccagggtgaaaacaatactgtagcgtagctttccgtccatcaaactatgcagcgcaatccccaccactaccgcgacgggcatcagcgccagaaagaaaggccaggtgtagataaagaagaacagcgtgttagagccataaatcaacatcggcatcgccagcgcaaataaccaggagataaaaccgaccacggcaccaggcagactccatgtggtttcttcatcctcagtaaggctgtcgttatttgttagtgtaatgttatggctattacgcatatttgatcctgttactttgacgaaccgggcatggaaacccggtggtgtctcaggatctgataatatcgttctgtctcaacagatctaataattgctgtaccaaatttgttactaattgttcaccattgagatgaatttctgcgctttcaggcgcttcgtaaacggaatctattcccgtaaagttgcgcagttcaccggcacgcgctttcttatataagcctttgggatcgcgggcttcgcaaatcgccagcggcgtatcgacaaacacttcgataaagcgcccttctcctacgcgttcgcgaaccatctggcgttcggcgcggtgtgggctgataaatgcggtcagcaccaccagtccggcttcaaccatcaaattcgccacttcaccgacgcgacggatattctctttacgatcggcatcgctaaaaccgagatcgctgcataatccgtggcgaacattgtcgccatccagcagatacgtactgacgccgagtttatgtaacgcctcctccagcgccccggcgaccgtacttttaccggacccggagaggccggtaaaccacagcactacaccacgatgaccgtggtgtagctcgcgttgttgcacagtgaccggatggctatgccagacgacgttttcgtcatgcagcgccattatttatcccccagcaaatcgcgcgcgccccagtgcggaaagtggcgacgaaccagagcattcaattccagttcgaatgcactgaattcagatggcgcagcagttgcctggctaactggctcgtgcaccataccggcacccacggtcacattgctcaggcgatcgataaaaatcagcccacccgtcaccggattttgttgataacgatctaacaccagcggctcgtcaaaagtgagatccacgaggccgatcccattcagtggcaggttttcaacttcacgctgggtaaggttattaatatcaacctgatagcgaatgccatcaacacgcgcgcgcgtcttcttaccggcaattttgatgtcgtaactctgccctggagaaagcggctgttccgccatccataccacatccacgctcgcgctctgcaccgccggtaacgcttcgtctgccgccagcagcagatcgccacggctgatgtcgatctcatccgtcagcaccagggtgatcgcttctccggcaaaggcttcttcgcgatcaccatcaaaagtcacgatccgcgcgacgttactttccacaccagagggcagcactttgacacgttgcccgacttccacgcgaccggatgccagcgttccggcgtaaccacgaaaatcgagattcgggcgattaacgtactgcaccgggaagcgcattggctgagcatccaccactcgctggatctccacggtttccagcacttcgagcagtgtcggaccgctgtaccacggcatactttcactttggcttgccacgttgtcgccttccagtgcagagagcggcacaaagcggatatccagattacccggcagctgcccggcaaaggtcaaataatcttcacgaatacgggtgaacgtctcttcactgtaatccaccagatccattttgttgatcgccacgaccagatgtttgatccccaacagtgtggagataaaactgtgacgacgggtttgatcgagcacgcctttacgggcatcgatcagtaagatcgccagttcacatgtgcttgcgccagtcgccatattgcgggtgtactgctcgtgccctggggtgtcggcgataataaatttacgcttctcggtagagaaatagcggtaggccacgtcaatggtgatgccctgttcgcgctcagcttgcaggccgtccaccagcagagccagatccagcttttcgccctgggtgccgtgacgcttactgtcgttatgcaggctactgagctgatcttcgtagatttggcgggtatcgtgcagcagacgaccaatcagagtacttttgccgtcatcgacgctaccacaggtcagaaaacgcagcaggcttttatgttgttgcgcaatcatccaggcttcgacgccgccttcattggcgatttgttgtgcaagtgcggtgttcatcttaaaaatacccctgacgttttttcagctccatagaccccgcctggtcgcggtcaatcacgcggccctgacgttcactggtggtggaaaccagcatctcttcgatgatttccggcagtgtttgtgcattactctccaccgcaccggtcagcggccagcagcccagcgtacggaaacgcaccatccgttttttaatcacttcgcccggttgcaggtcgatacggttgtcatcaatcatcatcaacataccgtcgcgttccagaaccggacgttccgcagcgagatatagcggaacaatgtcgatattttccagccagatgtattgccagatatcctgctcggtccagttagagagcgggaagacgcggatgctttcgcctttgttaatttgcccgttgtagttgtgccacagctccgggcgctgatttttcggatcccagcgatggaagcggtcacggaaagagtaaattcgctctttagcgcgggatttctcttcgtcacggcgcgcaccaccgaaggcggcatcaaaaccgtatttgttcagcgcctgtttcaggccttcagttttcataatatcggtatgtttcgcgctgccgtgcacgaatggattaatccccatcgccacgccttccgggtttttatgcaccagcagttcgcagccgtaggctttagcagtacgatcgcggaactcatacatctcgcggaatttccagccggtatcgacatgcagcaacgggaaaggcagcgtacctggataaaacgccttgcgcgccagatgcagcatgacgctggaatctttaccgatagagtagagcatcaccggattactgaattctgccgccacctcgcgaataatgtggatgctttccgcctccagttgccgcaggtgagtaagtcgtatttgatccataaccgttcctttgcaataccgctattttcttgccatcagatgtttcgactatagggagcgtaagagaacgaatgaaattaccaattagaatgagtagttccttaacggaataacgatttggcaaagctaatatcaaaaagtgcttaaggcaccggatttcgggcgtttaggaagatttgaaattgttttagcgcagcggcagtttcatactatggcggtaaaaaaatttgcatggtatttaaggactcactatgttttccgcattgcgccaccgtaccgctgccctggcgctcggcgtatgctttattctccccgtacacgccagcagtcctaaacctggcgattttgctaatactcaggcacgacatattgctactttctttccgggacgcatgaccggaactcctgcagaaatgttatctgccgattatattcgccaacagtttcagcaaatgggttatcgcagtgatattcggacatttaatagtcggtatatttataccgcccgcgataatcgtaagagctggcataacgtgacgggaagtacggtgattgccgctcatgaaggcaaagcgccgcagcagatcatcattatggcgcatctggatacttacgccccgctgagcgatgctgacgccgatgccaatctcggcgggctgacgttacaaggaatggatgataacgccgcaggtttaggtgtcatgctggaattggcagaacgcctgaaaaatacgcctaccgagtatggtattcgatttgtggcgaccagcggcgaagaggaagggaaattaggcgctgagaatttactcaagcggatgagtgacaccgaaaagaaaaatacgctgctggtgattaatctcgataacttaattgttggcgataaattgtatttcaacagcggtgtaaaaacccctgaggcagtaaggaaattaacgcgcgacagggcgctggcaattgcgcgcagtcacggaatagccgcaacgaccaatccgggtttgaataaaaattatccgaaaggcactgggtgttgtaatgacgcagaaatattcgacaaagcgggcattgctgtacttagcgtggaagcgactaactggaatcttgggaataaggatggttatcagcaacgcgcaaaaacacctgccttcccggcgggaaatagctggcatgacgtaagactggataatcaccaacatattgataaggctcttcctggaagaatagaacgtcgctgccgtgacgttatgcggataatgctacctctggtgaaggagttggcgaaggcgtcttgatgggtttgaaaatgggagctgggagttctaccgcagaggcgggggaactccaagtgatatccatcatcgcatccagtgcgcccggtttatccccgctgatgcggggaacaccagcgtcaggcgtgaaatctcaccgtcgttgccggtttatccctgctggcgcggggaactctcggttcaggcgttgcaaacctggctaccgggcggtttatccccgctaacgcggggaactcgtagtccatcattccacctatgtctgaactcccggtttatccccgctggcgcggggaactcccgggggataatgtttacggtcatgcgccccccggtttatccccgctggcgcggggaactctgggcggcttgccttgcagccagctccagcagcggtttatccccgctggcgcggggaactcaagctggctggcaatctctttcggggtgagtccggtttatccccgctggcgcggggaactctagtttccgtatctccggatttataaagctgacggtttatccccgctggcgcggggaactcgcaggcggcgacgcgcagggtatgcgcgattcgcggtttatccccgctggcgcggggaactcgcgaccgctcagaaattccagacccgatccaaacggtttatccccgctggcgcggggaactctcaacattatcaattacaaccgacagggagcccggtttatccccgctggcgcggggaactcagcgtgttcggcatcacctttggcttcggctgcggtttatccccgctggcgcggggaactctgcgtgagcgtatcgccgcgcgtctgcgaaagcggtttatccccgctggcgcggggaactctctaaaagtatacatttgttcttaaagcattttttcccataaaaacaacccaccaaccttaatgtaacatttccttattattaaagatcagctaattctttgttttcaaacaggtaaaaaagacaccaaccttaaaccatccaaatctaccggggtacgcctgtttaacccaaatgtctggaactcaaatcccgtttccgtattcgttgcccatgccatcactacattgccttcttccgccagtccagctatttgttcccagatcatttcacgaatttttgcggatacatcacctacatatacccctgcacgtacctccaacaaccagatggctaatctgcctcgtaagcgcggaggtacattttcagtgaccacgaccaacatactcatttcagctactccgatggcctgcatctcccagactaacaggaagcggaatggcaacaggctgtgcatcttcaggtggggccggcggttgtatttctccagcggcaagcacgtcctctataagcggaatcaatttggctaatgttttactactgcgaaaaatatccctgcacgccaaacggacttcccggtccggctcaccagggttacgacgcgctatctcaaaagctttcggtacaacagtgtcaaatttaatgatgtctgcaatatcgtaaacaaaggaaagaggctttcctgtatgcacaaacccaatagctggtgcataaccagctgcaagtatcgccgcttcagttacgccgtataaacaggaagttgcagcgctaatgcattggttgatcgtatcgcccttttcccagtctttcggatcgtagcgacgtccattccatgtcacgccgtattgcttcgccagaagtgcgtaggttgcccgcacgcgactgccttctatacctctgagttgctctacggagcgccgggcaggcgcaggttctccaaaccgaagttcaaacattttacgtacgaccttcagacgcaaatcttcatccagagcaagttttgcctgatagagcagcttatcactacgcgcacctccaggctgaccagaagcataaacacgaacgcccgcttcccccacccataccaacaatgttccaacttgcgcagccaggcgtacagctgcatggctaacccgtgtaccaggttccagcatgatgcaggcaacgctgccaacaggaatatgagtgcggatccctgtcttgtcgataagtacaaacgcgccatctattacatcgatctgcccatattgcagaaagatcatggagacgcgatctttgagtggaatgggattaaggggaagccaggtcattttattacacctcaatcacagtggagccaaagatagcaagccacatcccatgcttttagctggcccaataccttgctgtacaagatctattaacgctggcgcgtcgttgatggtgagcacaccttcaaagcaaaccgtttggatctttccacttttaccatcaccagaaaaatactgtggccgttcgcttatgggatgcacatcttcaacgcgcgccgcattgcccaatttacgttgcaaccacgcgatttgttctgcttcttttattaacggaacccgacagcgtttaatattccctttactgtccaggcgcttttgattgtcgagaatagttttgatcggatttgcccgaagccgaaaatagagtggaacaccaacctgaagttgaaattcaacctgtttagttttaatgactgtcgcaacggcagtactaacaggcatttgcgcactctgcaataaaacatgacagccttctggtgtgtttcgcttctcaacatgaaaaagaaaatcacgagcagcatccggtctgtttggaaataaatgccataatccctggtgaagttggtaaagatccctgctccaggccctggcaatgatgactttactgagatacatccatacctcctttaatcacataccattctcgggaagcaaattgtcgaggcaaggtgatcatcggttcgtcgcgcgccgtaaattttaaatgatgccctgtaacactttcctcactatatatatcgccgccaacgggctcataatttaatagcgccttctgaggatcgcttgcctgacatgtccccaaaaaaagcgggtgtgttagtgggcaacttctccgccccaggtaaggtgtataccgaggctttaatactgctttttcaagttcactgataaccatcgttgcatggggtgttaaccagagagcgacggtaaaggaggcatcacataaatattcgcgccatgtttgaatcgtttcatgacttttcaaaccacggtaatcttctcgcgctccaaggactgtatggtaatcacgcaaccccgttacagacacacgacgatcgtcaagaatgagttcatcgcagcgcactgcaaattgcacactctcacttaacgcctgtaaactagaagtatcatcacgttggatcccaagacaagccccgagtagccctaataacccgcttcgggtcggaaatcttccggtaggtcgcgttccttcaaaggtcggctgcccccaggcttgcattggcccagcaagccgcaagatcaaataagatctcatgttcacgcctcgccattattacgaacccaggattttaactgttctaaagtaggcatttgtttaacttgagcagtaattgggtctacatcagataagctgaattgcgcagcagctccgttcagaccatatccattggcaacgcgatcccaatattgattaaacgcctgtatagacggttgcaaaaagccatctttcgctttaaccgctttttcaaaagcatttgccatagaaagtggcatatcggagaaattaaccattaccatatccgcagggttaaaagcggcataagtacgctgttttgctccagggacctctgttgccagcatatgaacaacatgggttgcaatttccagagcctgctccctggaggcaccacctaaattttcctgaagttgagcgaggttaatgttggcataacgataaaaaacaccgctactaaattcctgagttcccagatgtgcagaaccttgttcctgtaaatcatctacagcggtgaaccagtcaatatcagaatcaacctgatgagtagtgatcgcatgcgcaatggacattgcaccatcaacttttcccaactcagtcatcatgccgctggttgccattcttccactaagcgcaatatcaacaccctgctgtaaattcacacgtatggcggcaatatcttccttaagaactttgagcagctttttatcatccagattatcagcctctgcttttgcaacctgctcacagaaccaggctatttctcccacaacccagggagtaaccgcatcggcagaaatcttttcggcttcatcaacacttttaccggagagcagcgctaatgtcttatcgatgattttttggtcaaaacgttcaccaagtttttgccgaagaacatcacgtaattgtgcaagatgaatggttctgagactggattcaccaatattttgtgcgtaataaccacttttacgcatcgcacgtttaaggctttgactactaattcttactcgtcttttgccgccgaaaatagcgtctttctgcatgttcatatcgtcgcggttcagacaactagggctgtgagagatcagaacatgaatattgataaagttagacatagaaaggtttccttacgcatttttgtttgtggtcaatacaaaatcttccagaagttgctggcgttcgcgctttccccaccaggtcaacatcctggccattaatggccagtcaagtacgggttcggcgtgagtaagtaatcgacgtaactggaccatatcggctgttctgtcagcccgaattaattgaaagatacggcgctcgttaattcttccactattggctaaagctcttcccaagctgatacctgttgtttgctcgctttttttgtcctgatgtcggatgacattctttcctgcgctcaggcaaaacaccatgcgcaaaagagcctgctggtgacgtgggttttcccaaccaaaaggttgcaccagcctataaaacgcagggatatcgcgtaattcatcaggttcactaacacgtctaatttgcgcacaacttccattatccagttgttgccaggctcgatataaagccattgcatcaatttcatcagccattacttggccctccttgcggttttaactcccgtaaatgtttgtatagcgtggcgcgggcaagcgctaatgtgcttattaatttaggatgatgtgcatagggagctacagattgattaaatagcatttcacacaattgatgaagtttgtctcgtaaatcagctattacctcatcagcctgggaaaaattaacattcgccagtacatcgggaattaataattcactctgtcgatagaaatgcctttctgcagtctcatgaacagagactccggcccctttgaagtctttatttttaaacccttctgcaaaggtatataacgccttgcgtaaggctgttttatatcccaaaccaacagtcactatttcgtttatcacattgccgtattgttgccacccctgattaaacatcaacacatcatgacgccgttcaagaatagatgcttgattattacgatatccccccataatcaattcaagaggactttgcggcgcaatatttctgaattgattcacaaccgccgccacgcgatttccattttcattttgaataatcttatctaccacaactcggctgatttgtgtccaacttggtgcggaggtggtgaaagcaagaaatttttcctcaacctcccctttcttgactgttaccagacaaggggaatgcggatggggccatagcccattaactgtaaaggtaaatttttccttaagaaaaccggtataacgcaaattgctttcctgtccacagcaagaacatttaccaatcccaatgggatcgcataattcaatatgcgctggttgccagaatagaccacggacaaacccaatactgctagcaggtatagactcattggacttgataggtttaatccaggtaggttggttttccgtatgactttcattaggaaattgtttttgaagacgaggtaatgtgaggacattgagtaacaccgtactacgaagatcgatcccacgtacgaacgttgttacaggtgttcctccacgtaaaccgcttttaaaaccaccaccaaaacctggtgcctgattcgcctggttgaataacgcaatcgcagtgcatccaccacataatgcttcaccctgccccggttgattgacaaatgcacaattcgtcgcgccgcttaccccagccaacagtttttccattggagtcacatcatttgctttgacacctttggtctgcataaagggatgttctgcgtgattaaggtagaacatatctatccacggcgcgatgagttgttgaaactcatcttcagtgagcggattcattatgcgatgtcgaaattcaacgtcatcttttgccggggcgataatttgcccaatgcaaaccagcagtgctaaagcggccagttccatatcgtcacggggcaaacttaatcgccactgatctctactgcagtataggctttgcagatttatgatttggactttccccccgtttcgcgggcgtacagggatccagttatcaataagcaaattcatttgttctccttcatatgctccgacatttctcctgcatttctatacgtcggcacacttccgttatcggtaaaaacaaagaaaaaatacggcgtaattaattcaataatcacattcactgcaaaaatatattcattggtttaatacaattaacctatacatatattaagatgtgttgaattgtttaaagacaataatgcatgcatttcaaatctgcaagttattcgttttattattaaagaaacttttagttataataattaccatgaattttattacataaaatattcatactgtgaatataaaatctcataccgggaaattaaaagaagatgtacattgtgcaccttccctacttaagtagggataaaccgttattggtcttattatcgtcattgataacaatcattcccgaagttatttgggatttgcagggatgactctggtcatcccttcatcccctgtataggtaataacaatactgttaccctgccagacccatccatccagattctgtttcccttccagccaaagtaacccatcttcatctactacttcagaaaaactacgtttccaggtgaagggtacattgacgcgattaagtgcaagcgcctcatactgctgttcatgacttaggtcctcgtagacctggccatcgagcagttgtttaccactagacgtttgtacataaggcaataatggcaggctcatttccccatccctcgttaccgcaagaatggtttcatcgttatcctgcaagctatattcttcagcccactgcaggaccttgcgagccttgaaccttttttcacactcggcgctttcaaatttatccatgccattgccgacccattctggctcatccatttccgcatcatcgtaaatgctatccagccattgccggtaagcatcagggaaaaataaggatgctccattaagctcctcaatatgttgctgcgtccgccacatgactctaacgttgctataaatatgctcatgtcgtccgtaaccctcgccatcaggcagcaaaatggtggcaacaggaatctcaaaaccagcgggacgatatttgcgatgatggcgatgtaaacggcccaatcgttggaaaagcaaatctgcaggacaatgctgagtaattaaccaatcaaaatcaacgtcgagactttgttccacgacctgggttgcgacaagtatccgtccaacatttcgcttcccatttttgccgaaattgctaataactcgattctctttttcacgacgatcgttcagcgtaaagcgcgcatgaaacaaatctatatctacttgcgtgttatttagctcctttagccgttggtagcatacttgtgcaacgtcaaccaaattgcaaataagacagacctgtgcacccgcgtttgccgctgcgatcattcgctctaacatcgtaaggtcaggtaacatgtcagctaaacaaataggttctggctgaatgctaaagcggggcgggagttgttctggatgagctagcagatcaaaacgttgcgcaccattcacacctcgccagttaatgagtggatatgcggagttattttccactggatctgtatgcagaccataagtatccagaagtttctgtttttgtttcattggtagggttgcggaaagaagaataacactccctcccacatcagcctgagccttgagcactgcctccagcaagccgttcatataggtgtcgtaagcatgaacttcatcaacaattaaaacacttcgaccaattcccaaaccacggataaagcggtgtttaactggcaatacgcttatcaacacctgatcaatcgtgcaaacgccgatttgcccaagaaacactttcttattgctttgactcaaccactgacaacactgaacccacgcttcttcttgcccctgttcagtaatcgcgcgactttttatactttgaaagaggtggttaaaccgactattgccatgagcaagaataagatttggggaactaaataagtggctcgcgctcgcttccattctcgtaagcatagcattcgcggtagcttgtgttgggagggcaaaaataacactatccgcaatttgttgatcaataagtttccaagcataggccagcgctgtttccgttttaccggagcctgtaggtgcctctattaccgtcagcccgggagctactggaagagcatcaactaacacctgtaattgtctgggttgatagccattgtccagtagtgcatgaacaccttcataacatcgcttattacttacaagtccactcaactccaatacccggctcgcatcctgctgtcggtcctggaaatacgttctcagagcatttatgtcggaaggcgcatcctcattaaacagaaaggtattcgttgtagtccaggagcctaaccagtcagcaaggctgcaaaaacctgctaacagactactacaatcaggtggtatatcgtttatagataaccccgctggcgttaaaaataatgcttccagtacagatatccactcctcacgagcctgtttatcttgcgcagcataagatgccagagaagctggcatttcccaacggctcttatcttgatcctgggaatgtaatataaaaccatgatgtcctgtaacggcctctacccatggaaaccaggactcataaggatgaggagcggcatcaaaaaaactgaaaaaatccccgagagattgctcactaagactatcctggttaaaccaatacagaccggctgcaccatgattaaatttacggcacatttgtgtacttggaccattaagacttggcgttgcaggatttaatttcagccaactttctgcacttttatattggaatcgtatatcaaactttccaatatcatgaagagcaatgaaaaataacagccaggccttcaccctctgtttacttagcatttcatttcggcaaaaagtattttgcagtacgacactttgatcccaccagcaatctgcaacagcagcaacatcaaggcaatgataaattaacagatgaatatcatttcctttcgtcaagcttttactggattttccccagtaatggcatatatatttaaaaggttccattaatagcctccctgtttttttagtattatcgatgatatcagcgggctatttttcgatgctgctcataaatatcgaattacagtgatatacacatgtcttgcctccctgcaaagaagagactaacattcgaattgtttgggttcgaacgctggcctcaggttgatagaaatatcgcctggggcttttgtccatctggaacctcgcgaatgcttaacgccagacagcctcaagcacccgacgccattctatacctgataattcttcccgcggcgttcacgtttaaaatcaggaatgctgctcgcaaaataaaaacgcccccatcatttctgacagaggcgtttaatttgtccggcaatatttacccttcgtgtaacccacattccctttttaagccaaagaaacgcgtttcttcttccgccatgccgggttcccatttacgggttgtatgggtatcgcccacgcttaaatatccttcatcccataatgggtgatatttcaggccatgtttttgcaggtactgataaatagttcggttatcccagtcgataatcggcagcactttaaatacgccacgctgaattgccagcaccggtaaattggcacgactgccggattgttcacggcgcaggccagcaaaccaggtttgcgcattcagttctttcagagcccggttcatcggttcgactttgttgatgtcattgtacttttcaatgccttcaacgccctgctcccacagttttccgtagcgtgcttcctgccaggctgcgctttcggtagcacggtacactttcaggttgagcttgagtttgtccgttaactcgtcaataaagcggtaggtttccgggaacaagtaacccgtatcggtgaggatcaccggaatatccgggcgaatttgattcaccagatgcaggctcaccgccgcctgaatgccaaagctggaagaaagtacatattcaccgggcagattatccagcgcccaggctacgcggccttcagcgtccagtttttccagttcggcgttagtttccgccagcgccagaatgcgatctaccttcggcagttcgttcagggcgtttagatcgagtttggacatagattcctcactgtttgccttgcctgatgcgacgctcacgcgttcttatcaggcctacaagaccgggctgatggttaatcccacaaatcacgcgccggatcgagcaccgggcgaatgatgcccgcacgcaccgtaaagtcgccgaagccttcacccgcttcgcgctctttcgcccagcgccctatcagttcatcaaggctcgccaggatttccggctcggtgatgttttctttatacatccgtgggatacgtgtcccaatgcggttgccgccaagatgcaggttgtagcgacccggcgctttacccaccaggcccacttccgccagcatcgcgcgaccacaaccgttcgggcagcctgttacacgcatcacgatatgctcatcgctgacaccatgtttcgccattaaattatcgatgttgtcgataaaagacggcaggaaacgctctgcttccgccatcgccagcgggcaagtcgggaaactcacgcaagccatgctgttttcacgctgcggcgtgacggcattcattaacccgctctctttggcgatcttctcgatcttcgctttctcgctttccggtacaccggcgatgatcagattctggttcgccgtaatgcggaaatcgcctttgtggatcttcgcgatctccagcaggccggttttcagcggacgcgccggataatcaaggatgcgaccattttcgataaacagcgtcaggtgccagttatcatcaatgcccttaacccagccaatacgatcgcctcgtccggtgaactcatatggacggatcggttcaaatttgatccccgcgcgacgctccacttccgctttaaacgtctcaacccccacgcgctccagcgtgtatttggttttggcatttttacgatcggttcggttaccccagtcacgctgagttgtcacgacggcttcggccaccgccagcgtatgctccagcggcagatagccaaactcactcgcggtgcgggcgtaggttttcttgttgccgtgttcgatggaaagcccaccgcccaccaacaggttaaagcccaccagcttgccgttttcggcgatcgccacgaagttcatgtcgttggcgtgcagatcgatatcgttctgtggcgggatcactaccgtggttttgaatttacgcggcaggtaggtctggccgaggatcggttcttcatcagtagtggcgactttttcctggtcgagccagatctccgcatacgcgcgggtacgaggcaacagatgctcagaaatcttcttcgcccactcgtacgcttccgcgtgcagctggctctcgtaagggttgctggtgcagagtacgttacggttcatgtcgttagctgtcgccagcgcatcaagaccgacgctgtgcagcatctggtgcaccggtttgacgttctttttcagaatgccgtggaactgaaacgtctggcggttggtcaggcgaatgctgccatagatggtgttttcaccggcaaatttgtcgatcgcctgccactgtttagtggtaatcaccccacccggcagacgacagcgaagcagcatcgcgtggcgcggctccagcttctgttcagcacgttcggcgcggatgtcgcggtcatcctgctgatacatgccgtggaagcgaatcagcaggaagttgtcgcccttaaagccgccggtcagaccgtcgtttaaatcttccgcaatggtgccgcgcaggtagttgctttcatgcttcatgcgctcggcgtctgtcagttttccttcgaccactaaaggccctggatgtttttcgctcattagtagacatctcgctgataacggcgctctacgcgcagctcacttaaaaattcatccgccgcttcggtgtccatgccaccaaattcggcaatcacttccagaagtgcctgctcaacgtctttcgccatgcgattagcgtcgccgcagacataaatgtgggcaccatcattgatccagcgccacagctccgcgccctgttcgcgcagtttgtcttgtacgtaaactttttctttttgatcgcggctccaggcaagatcgatacgtgtcagcacgccatctttgacgtagcgctgccactccacctggtacaggaagtcttccgtaaagtgcggattaccaaagaacagccagtttttacctggcgcttcgtcggcggcgcgttgctgcataaaggcgcggaacggcgcaataccggtgcctgggccaatcataatcaccggggtttctggattggctggcaggcggaagttatcgttatgttcgataaatacgcggacttcgccctcttcttccacgcggtcagcgaggaagctggaggcaccaccggcacgggcgcggccttccacgtcgtaacgcaccacaccaacggtgacgtgtacttcgttctcgacttccgcctggctggaggcgatggaatacagacgcggcgtcagcgggcgcagcagattaattagcgcttcggcatcaagctgtgccggggagaaacgcaccatgtcaacaatcggcgtcgtcgcggcgtaatgctgtaacttcgctttatcgcccaccagcggcagcagtgtttcactgcgggtaagcgtggcgtaattctcaacaatgttggcggtgttgacggtcagttcgaagtgccactgtagcgcttcgttcagaggcaacgttttgccctcgacggtgacaggttcatcgcctttcagccacagcagttcgacaagttctttcaccagtgccggatcgttctgataccagacgcccagcgcgtcacccggctggtaacgcatgccgctgtcacctaagtcaatttcgatatggcgaacgtctttttcagagttacgcccggtaattttctggttaacagagaggctagccaccagcggcgcgtctttgctgtacgggctggtgtggatttcatttaccgcgccagtagcgacggattggctaggtgccgcgacaggcgcacggcttttaagcgcatcaaccacgcgggcgcgccactcgctggcagcagcctggtattcaacatcggcatcgacacggtcgagcaggcgttcaccacccagttccgccagcttgctgtcgaaatctttcccggactggcagaaaaattcataagagctatcgccgaggctaaacacggcaaacgcggtgttttccagctttggcgcttttttggagaacaggaacttatgcagcgcgacggcttcttccggcggttccccttccccttgcgtactcgtcactacgatgagcagtttttcgctggcgatttgtttgaatttatagtcgcccgcgttcaccagcttaacgttcagttttgctgctaataaatcatcacgtaatgcttcagcaacccggcgcgcattgccggtttggctggcggagataatagttatacccggcatttctgcggctggcgctggcgtcgctgcaagcgcagcaggctgctgattgagtacgccccagaaatagccagaaacccaggcaagctgggtgggagttaaatcggtcgtggccgcctgaaggcgtgccagttgctccgggttcaacggaagcaacgcggaaggtgggacctgtgtcgtcatgcgtcgttatgttccagtaagcaaagctgtttctgcgccctgtcagcgcccataaaacagaagagaaggtaaggttaacggggcaaacggtgtggattaaagacgggatagcgataactaataaccaaatcgactaacctgttttagcaatagtctttaacaacaaaatagattaaccaacctaatgaaaaacaaatgaatttagccaatcattaagataaatcagcgattttgcgcaacaaagtcgttttagataatgcgaaaaaacagcctttccggtactctacggcggttttatcgtcctgtagagaaattatgatgtccaccacgttatttaaagatttcaccttcgaagccgctcaccgcttaccacacgtcccggaagggcataaatgtggtcgcctgcacgggcattcctttatggtgcgactggaaattaccggggaagtcgatccgcatacgggctggattatcgatttcgctgaactaaaagcggcgtttaaaccaacctacgagcgcctcgatcaccattatctcaatgatattccaggtctggaaaacccaaccagcgaggttttagcaaaatggatttgggatcaggttaaacccgttgtgccgctgttaagtgcggtgatggtaaaagaaacctgcaccgcaggttgtatctatcgcggcgaatgataagagtgtgtcggcggtcaatttcccttaagtaacgctatgttagggtgttgtgttctggatatctggggcatgacatggaagacgactgcgacattattattattggtgccggtattgcaggcaccgcttgcgcgttacgctgcgcgcgagcgggtttatccgttttgttactggaacgcgctgaaatccccggcagcaaaaatctttccggcgggcggttatatacccatgcactcgcggaactcctcccgcaatttcatctgaccgcgcctcttgaacgacgcatcactcacgaaagcctttccctgttaacgcccgatggcgtaacgacgttttccagcttacagcccggcggtgaatcctggagtgtattacgtgcacgattcgatccgtggctggttgccgaagccgaaaaagaaggtgtcgaatgcatccccggagcgacggtggatgcactgtatgaagaaaacggcagagtctgtggcgttatttgtggtgacgatattctccgcgcccgttatgtggtgctggcagaaggtgccaacagcgtcctggctgaacgtcacgggttagtgactcgtcctgctggcgaagcgatggcgttggggatcaaagaagtgctgagcctggaaacatccgctattgaagaacgttttcatctggagaataacgaaggcgcagcgttgctgttcagcggcaggatctgtgatgacttacccggcggcgcatttctttatactaatcaacaaacgctcagcttagggattgtttgcccgctctcttcccttacgcaaagtcgtgttccggcaagcgagctgctgactcgctttaaagcgcatccggcagtgcgcccgcttatcaaaaacacggaaagtctggagtatggtgcgcatctggtgccagaaggtggcttgcacagtatgccggtgcaatacgccggtaacggctggctgctggtgggcgatgcgttgcgcagttgcgtcaataccggaatttccgtgcgcggcatggatatggcgctgactggcgcgcaggcggcggcacaaacgctgataagcgcctgccagcaccgcgagccgcaaaatctgtttccgctttatcatcacaacgtagagcgcagcctgctgtgggatgttctacagcgttatcagcatgttccggcgcttttgcaacgcccgggatggtaccgtacgtggcctgcgttaatgcaggatatttcccgcgatttatgggatcagggtgataaacctgttccaccgctgcgccagttattctggcatcatttacgtcgtcacggcctgtggcatctggcgggcgatgttatcaggagtctgcgatgtctgtaacgtaagatgttatcaggagtctgcgatgtctgtagcccgtaatctctggcgcgttgctgatgcgccgcacattgttccggctgactccgttgagcgccagacggcagaacggttgattaacgcctgtccggcaggtctttttagcctcacaccggaaggtaacttacgtattgactatcgcagttgcctggagtgtggcacctgccgtttgctgtgcgacgaaagtacactacaacagtggcgctatccgccttccggattcggcatcacctaccgctttggataaataataaggataatttatgcccctcttacacctgctccgccagaatccggtgattgctgccgttaaagataatgccagcctgcaactggcaatcgattctgaatgccaatttatttccgtgttgtacggcaatatctgcaccatcagtaatatcgttaaaaagattaagaacgccgggaaatatgcttttattcatgttgatttgctggaaggcgcgagtaataaagaagtcgttattcagtttttgaaactggtgaccgaggcggacggcattatcagtaccaaagccagtatgttgaaagcggcaagagcggaaggttttttctgtattcatcgcctgtttattgttgatagtattagctttcacaacattgataagcaagttgcgcaaagcaatccggattgtattgagatcctgccaggctgtatgcccaaagtgctgggctgggtgacagagaaaatccgccaaccgctgattgccggtgggctggtgtgcgatgaagaagatgcgcgtaatgcgattaacgcgggtgtcgtggcgctttccaccacgaataccggggtctggacgttagcgaaaaaattactttgacgggataatcgtaaccaattgaatttggtttgatttgtaggccgcacgccacatccgacattcagcgcctgatgcgacgcttgacgcgtcttatcaggcctacaagtccccaggccagaaccgtaggcaggatcatccggcaacacgttattggcaatctgcgtgaatgtttgtcaccagtgcctccagcaccactttccagtcatcaaccacgccaacatctgcctgactaaataccgcagcgctggcgtcatgattaatcgccaccacaaacttgctattgcgtacgcccgccattaacgctgctgcgccagaagcgccaacaacaatacacacctcaggtgccagcagatgtccggaaataccaatcactttttcagcatcaacgccaccgttcatcactcgcgcccgactgtagcccacttcggctcccagcttttctgccagcatagcgatttcctggttatctgcctctccgccctgccccaccaccagcacccgtctggcctcagctaatgggtcgcgggtaacatttttcagatcctctgtgctaaccagccagtccggaagcgcacccgggacaatgttcagttgttgcattccagagggcaacgtggcgtttttcgctgctcccgcctgacgcgccagggaaaggcatagcgggcgtttttctgtttgcagcgtcgccgttagcgcatttccccagtgggatttgcgcacgcttacggttggaatatctaagctagtcacctggcagatgcttgcaccatgtaaacgccaggccagccgggtgctcagttcatcgccaaacgttcccggcggaaagagaacaacgtccgcaggcgttcgctgccactgttccaccaacgcatccagcacctgttccgccactacaggctgaggttcaatctgccagtgcgccagggtacaaccgctgaaatcctgcgccgccagccagcttgctattgcggcattctcctgatttattgtcacaattgcgatattcatggctgcatcctttggcgtaaatagtcctgccatagcttttgagctttttctgctaccgtttgcccatcaatcagcgtcgctccgcgtcgttgctctgctcttgccagttgcagacactgcatcgctggcatttcggcagcaacagttttacggataatttctgctttccccgcagccattcgctggcgcattcccggtactggcaaggccacttcaccgcactgacgcacggcaatcaccgcaggcaagcgaacccggcaacaacgcaacccatgttcagtacgctgttcgagggtgataaacagcgcgtcgagagtgaaacgctccacctgggtgaagcagggccagcccagcatttccgccagcaaaaatggcgtttgcccattctgcccttcgctgctttggcagccggtaattatcagatccagcggattctgatgctgccattcggcaatatggcgagcgacaaattccggcgcaaagcgcagatctgccgccgtctccagcaatacagcttcctcaaacccaagagccatgagatagcgcagccagtgcaatgcccgttcatcccccatgctcaacgcggttaaagacatcggcgtaccgttttttctctgcgccaacagcagcgcggcagcggcctgttcatcagcaccgagtaaacttcgcagtaggctaatatccggtccgcttttaccctgagccgccgcctgccactctttttccgccagcattccggcatccggttcggctttaaacgctaacagaatgttcattcgcacctcctacatttcccgccgccaccagcgggagggctttagtttctggtgcccatagccaggtcacaacaaaaccaaccaacaacactgtcgccaggagcaataaggtgacttgcattccccactgcgccagcacccacggcagcaggccagtacttaccgccgcgccaagtcgactcatggcagtggcaaaaccgacgcccaggctgcgaatgtcagtaggaaaactttccgcaggcaaaatgcccaccagattactgactgcgctaatggtggtgctgaagagaacaaaaagcagcagcgttaaactactgccggaaggcaaacaggccatgactaccagcgttgccgccagcagcaaaaaacttcccagcaaaaatttgcgatgtgccagcaggtgcgtcagaactaatcccagcagcgcgcccacaattaacaacgcattaagcatcaggctggcagtcagcgcatcttccagaccaatagtctgggcgatagttggcagccaggtataaatcacaaaccatgggattacgaggcagacaaagaagacgctgttaaacgccgtgcgccgccagtaacggctagagaacaaggttttgatgtgtttatgggtcgccgttaccacttcatcgcccagtaaaacatggggaccaaaatagcgatgcacgatagcgtgagcttctgcaaaacgcccctggcgcagtagccagcgtggactttctggcgttccccagcgtaataacgtaatcaacaacgcgggcagagctgcgcttgccagtagccagcgccaggcctccgggttttcggaaataaagtgatgtccggcaatacttgccagcacatagcctacggtccacaccacgctgaatgcgcccagcaaaataccgcgatggcggcgcggggaaaattcagccagcaaggtgtgacctacactataatcgcctcccagaccaatgccaatcaaaatgcgcagtccaataagatgctctggcgtggtggcaaaaaattgtaaaaagctagcaagcgtaatcagcaaaaagctgaaggtgaagattttttgccgaccaatatggtcggagatccacccaagaaccaggctgccaaggaacaaaccaaggagcgcgctgccgccgatcattcccgccataaacggcgtcagttgcatggcgggcgtaagctgaataatggcgtaaccaatgacgccgagaacataaccgtcggtcaggtgtgcgccgaaagtgagcgcagcaatgcggcagtgaaaacggttaagcggtaaatcatccattcgcaccggactagtgttcatctttaccccttcattgtccggtaataagaacggcttctcgcctgagaagccgaaaaggcaacgccccgtcatcgcggaacgctgcctgacacattatttttcaatcggatagatagtacccgtattcataatgccattaggatcgaactgctttttcagcccttccagcaacgcccacgcgctgccgtgttccagtttgctccagtgaacgcgatgtttaccgataccgtggtggtgcaccatgctaccgccgaggcgaatggtttcttcacagatgatcttgttgagcggattgtggtacttgtcgatttcctcttccggcttacagtcaacgacgttgtaatcgtagacgaagtacatgttggtgccgttctgatagctatgagaggaatgaccgcccagcatggtgatgtcgtcggcgtgcgggaactcagtacgaatacggttaataacgctttcgtagatttcgtggatgcagctccagcagccggatacttcggtggtaaagcccatgttgccggttttgaggatctgcacacgttcggcagccactttatccggtccccagttcaggttgttaaaccaggtttcgatcagcttgctgtccacgcgctggcattgcgggtagcgggcaacgatttccgcaatcccttcgcccgtcaccttcgcaatgcgagggttaccttcagccataaagatcagcacgcattttccgtcggcaaaatgggtgaagtgttgggtgccatcttcagcgtcatacaaacgagcgatactcggacgatacccttccaccatgatttcacgcaggatgttgaagccggttttcatgtcttccaggatatagccgtagaagaggttgttttccggggtgaatttaaagattttcactgttacttcagtgatatagcacaatgcaccttcgttgccgatgatgatgtgacgaatgtccgggccagccgcgcggcgtggcacgtttttaatgcgtgtgacggtgccatcagccaatactgcttccagaccaacgaccatatcttcgattgcgccgtagagtgtggagaactgcccgatacttcgggttgctaccaggccgcccatctgcgccagcggcttactctgcggagaatgccccgtggtgtaacctttttcacgcaacgcgttttccagcacttccagcggaacaccacattgcgccgtcgcctgcatattctcaatatcaatattaatgatttgattcatggcggagccgtcgagcaccacgctgttttctacaacagtttccagcccaccttcggtggcggaagcaccggtacgcggcacaccgttaattttgtgcgcattcataaaattcagcacacgggatacttgctctgtggaaccgagttttacgaccgctgccggaatcggcaaagtataaatgccatgaatatccggaaatttacgaaaacggtcaatactgtttttctttaatactgtttcatcggtaattacgcgatctgcaccaacaatttcctttagctggtcgacaatcgctgcgcgagataaagacatagtaattccttcctgataataaaaatggaataatcattaataagagaaaacagaaaccaccgttatgggttagcgcactaaataaccgccatcaaccactaataaatgcccgttgacataattgcttgccggacttgcgaggaatacggctgcgcccattaaatcctgagtatcgccccaacggtttgccggaatatgatcaagaacgcgctgattggtttctggattactgcgtgtcgccagcgtaatatctgttgcataatagccaggggcgataccatttacctgaatattatattgacctagttcatcacaataagctttggtgaacccggcaagagcatgtttagtggcagaatatgcaggactccattgtccacctaagtaagagaacaaactacagatattaataattttgccgcttttctgcgggatcataatttttgcagcttcatagcttaactcgaatgcggcggtcaggttcacatcaatcatcggatcccagtcggcacgaccgaagtccagcaccttattcagcttacaaataccggcattgttaaccagaatatcaactgtaccgaaacgctcacagcaagcagcgataatcttctgcggcgcgccttctgcggtgatacccacctgcatgaagtccacctcaacaccctgtttttcaatcatttcctttgtttcgccgttatctttgacgaaactaggaataaagatatttgcgccagctttggccaacgccatggcaaatgcctggcctaaaccgctattcccaccggtaacaattgcggttttacctttcagggagaaaaaatccatactgaacgcattgagagattcgatactcatagttagctccaatttccgtaaggcaaaaaaaaagaaaggtaacttcccccgcgagagggaagttacctttctcattatctctggtaactggagataatttttagcataagggcataactgctaatgtgatcgtaatcacagtgtgatattcgtattgtcaaataattttaaaaagcagaagcgtgattactctcacacaacacctctgctttccatgttatttattatttcaattactagagacctgagaaaagtaatccacctgaaagggcggcttacttttctcttttttttgtctattacaaatgggaatacgatatgcaacacaacagttatcgccgttggataaccctcgcgataattagttttagcggcggcgttagtttcgacctggcttatttacgttatatttatcaaattcccatggcgaaatttatgggattcagcaataccgagataggtttaataatgagtacctttggtattgcggccattattctttatgcccccagcggcgttattgccgataaatttagtcaccgcaaaatgattacttccgcgatgatcattaccggattactgggtctgttaatggcaacgtatccaccgctgtgggtaatgctctgtattcagatcgcctttgcgataacgacgattttaatgctgtggagcgtgagcattaaagctgcaagcttgcttggcgatcatagcgagcaagggaaaattatgggctggatggaagggctgcgcggcgtcggtgtaatgagcctggcggtgtttaccatgtgggtcttttctcgctttgcaccggatgacagcaccagcctgaaaacggtcattatcatctatagtgtggtttacatcttgttggggattctgtgctggttttttgttagcgataacaacaacctgcgcagtgccaataacgaagaaaaacagagtttccagcttagcgacatcctggccgttttgcgtatcagcaccacctggtattgcagcatggtgatttttggcgtcttcaccatctacgccattctgagttactccaccaactatctgaccgaaatgtatggcatgagcctggtggcggcgagctacatggggattgtgatcaacaaaatattccgcgcgctgtgcggcccacttggcggcataatcaccacctacagcaaagtgaaatcccctacccgcgtgatccaaatcctttccgtactcggcctgctgacgttaactgccctgctcgtcacgaactctaacccgcaaagcgtcgcgatggggattggcctgattttactgctgggattcacctgttacgccagtcgcgggctgtactgggcctgccctggcgaagcgagaacaccgtcttacattatgggcaccacggtaggtatttgtagcgtgattggattcctgccggatgtcttcgtttacccaattatcggccactggcaagacaccctgcccgctgcagaagcctaccgcaatatgtggctgatgggcatggcggcgcttggcatggtgattgtctttacctttttgctgttccaaaaaattcgtactgctgatagcgcccccgcaatggctagcagcaagtaagccaggaaaattacaggagaaaaatcatgagcaaaaaatacatcatagggattgatggcggaagtcagagcacaaaagtggtgatgtacgatctggaaggtaacgtggtttgcgaaggcaaaggcttattacagccgatgcacacgccagatgccgatactgcagaacatcctgacgacgatttatgggcaagtttatgttttgccggtcacgatttgatgagtcagtttgccgggaataaagaagatattgtcggtattggtctgggatccatccgttgctgccgtgcgttattgaaagccgatggcacgcctgctgcgccgttgattagctggcaggatgcacgcgttacacgcccttacgaacacactaaccctgacgtggcatatgtcacctcttttagcggttatctgacgcatcgcttaaccggcgagtttaaagacaatatcgccaactattttggtcagtggccggtggattataagagctgggcatggagcgaagatgctgcggtaatggataagtttaatatcccccgtcatatgctgtttgatgtgcaaatgcctggcaccgtcctcggacatatcacaccacaagccgcactggcgacacatttcccggcaggactgccggttgtttgtaccaccagtgataaaccggtagaagctctgggggccggattactggatgatgaaacggcggtaatttctcttggcacttacatcgcattgatgatgaacggcaaagcactgccgaaagatccagtagcgtactggccgattatgtcttctattccgcaaacattgctgtatgaaggttacggtattcgcaaaggcatgtggacggtgagctggctgcgcgacatgctaggcgagagcttaattcaggatgccagggcgcaggatcttagtccggaagatttactcaacaaaaaagcttcttgtgtgccgccaggctgtaatggtctgatgacggtgctggactggctgaccaatccgtgggaaccgtacaaacgcgggattatgatcggctttgattccagcatggattacgcatggatatatcgtagcatactggaaagcgtggcgctgacgctgaagaacaattacgacaatatgtgtaatgaaatgaatcactttgcgaagcatgtgatcattactggcggcggtagcaacagcgatctgtttatgcagatttttgccgacgtgttcaaccttccggcacgacgtaacgccattaacggttgtgcaagcctgggggcagcgattaatacagcggtaggtctggggctatacccggattacgcaacggctgtcgataacatggttcgcgtgaaagatatctttataccgattgagagcaatgccaaacgctacgacgcgatgaataaaggcattttcaaagacctaaccaaacatactgatgtgatcctgaaaaaaagctatgaagtgatgcatggggaattggggaatgtggatagcatccagagctggagcaatgcgtaagtgaggaaggccgggcgggaaactgcccggcctgaacatacctgaatggttatccccgctgacgcggggaacataagttcgacaacttaaaaaatgataacaagtccggtttatccccgctgatgcagggaacataataaaaactttaactagttcggtttatccctgtttttacaaggaatattaactacactcgatgtctttagaataaaagacaatacgaatcgcactttatcaattttcacttaaagtatgaactggatatctttattcataagaactattcatcaacagcgtatagaggcggttatgtaaaaccactcattagcctcaaaacaaagacaaacttccagatttattacttaaccaatgaataacaagcttaaaaaatatactgttattctaaagaaaaaattaacaggcattaattcaatattaaaaaaataatagattaaaatttcttaacgatttaagaatcatacaaataacactttgattaaatttaattttttgtatcgataattgtgaacctctctggcatggagaactattttgaacatgaggtgttacgtggatatgttgcttattacaagtactgctaatataaaaacttgagaaagagataacgggttatatggtggtttatccccgctggcgcggggaactcgacagaacggcctcagtagtctcgtcaggctccggtttatccccgctggcgcggggaacacctgttttcgcaaatctatggactattgctattcggtttatccccgctggcgcggggaacacgggcgcacggaatacaaagccgtgtatctgctcggtttatccccgctggcgcggggaacactggctctgcaacagcagcacccatgaccacgtcggtttatccccgctggcgcggggaacacgaaatgctggtgagcgttaatgccgcaaacacaggtttatccccgctggcgcggggaacacattacgcctttttgcgattgcccggtttttgccggtttatccccgctggcgcggggaacactctaaacataacctattattaattaatgattttttaagccagtcacaatctaccaactttatagtatcacacaaacaacacatccattatgttaaagagcacttaatccattgattaaaaaggtaaatatttaaaataactctatacaaactaaaatctaccaaactttaccgcaataattttcactccagcgaaaaattaatgccacagaatttgtagagaatgctaatgattagccctggatgggtaaaatggaggagttttcagaggcgacaaacaatataaatgagtagaagtctttacaggttccacccatttataacgcttataaatgtttaatcaggcaatatttagatatttatgtgtttgcatgctcaaacgccaattacgcgcaatgcaggtttcaatgcacaaacgtgtggcatcatccttttggctaatcggctgcagtgcaatgactcgcggtttatcatcggtcagcgttgccagtagttcatccagtgcttcaatatcgcgtacgcgccccactggatgcttgatttcgttggctcgctccagtgcctgactcaacacttcatagccgccgcgcatgttcagctttgggcttacggtaacccaggtattcggtgtgcagcgtacctcatgagtaccactggtttcgatctggcagctaaaaccgttcttttcgagcagatcagtcagtggcagcaaatcatgaatgcaaggctcaccacccgtaatcaccacatgccgcgcggtgtatccctggcgaccaatgacagccagcaaatcttcactgctcgcagccccccacttatcactctctttggtcttcgccagaatgctgaaaagggagacttcccgatcctcaagcttttcccaggtgtgtttggtgtcgcaccaggcacagccaaccgggcatccctgtaaacgaataaaaatggcgggaacgccggtaaagtaaccctcaccttgcagggtctggaacatctcgttaatcgggtactgcatagcattctctgtgaagtggataattgttaattattgcagatcctgccacaacaatcatgtcttattaacattctgttacaggcaggtttaaagaaaaatgcgaaacatatcgttaataattaaagggagtaacgtattatgtcagaagaaaataaagaaaatggatttaatcatgtcaaaacattcaccaaaattatatttattttttctgtattagtttttaatgataacgaatataaaattaccgatgccgccgtcaatttatttatccagatttaatgagaaatttataatgcgctatttcatactaatgttcactttcgtatgttcctttgttgcagcccaaccaactattgtcccacaattacagcaacaagttacggatcttacgagtagcttaaacagtcaagaaaagaaagaactgacgcacaagttagaatctattttcaataatacccaagtgcaaattgccgtattaattgttcccacaaccaaagacgagacaattgaacaatatgctacaagagtttttgacaattggcgtttaggagatgccaaacgtaatgatgggatactgatcgttgttgcctggagcgatcgcactgtccgcatccaggtaggttatgggctggaagaaaaggtaaccgatgctctggctggagatatcatccgtagcaacatgatacccgcatttaaacaacaaaaattagctaagggattagagctagctataaacgctttgaataaccaactcactagtcaacaccaatatccgactaatcctagtgaaagtgaaagtgcgtcttccagtgatcattattactttgctattttttgggtatttgcagtgatgttcttccctttctggttttttcatcaaggcagtaatttttgtcgcgcatgtaaaagtggagtctgtattagtgcaatctatcttttagatttattcctgttctccgataaaattttttccattgctgtattttccttcttttttactttcaccatatttatggtctttacctgtttatgtgtacttcagaaaagagcatctggtagaagttatcatagtgacaacagcggttccgctggaggcagtgatagcggcggatttagcggcgggggcggttcttctggaggtggcggcgcatccggccgctggtaactcaaccataaaaaatgccagcccggaggctggcatttttaaatcagataaagtcagtcttatgcctggcctttgatctctttacgaccgttgtacggtgctttttcgcccagagcttcttcgatacgaatcagctggttgtatttagcaacacggtcagaacggctcatagaaccagttttgatctggcctgcagcagtaccaacagccaggtcagcgatggtagcgtcttcagtttcgccagaacggtgagagataactgcagtgtagccagcatctttcgccatcttgattgcagccagagtttcggtcagagaaccgatctggttgaatttgatcaggatggagttagcgatacctttttcgataccttctttcaggatcttggtgttggttacgaacaggtcgtcaccaaccagctggattttgtcgcccagaactttggtctggtatgcgaaaccgtcccagtcagattcgtccagaccgtcttcgatagaaacgatcgggtactgtttggtcagttcttccaggaagtgagtgaattcttcagaggtgaacgctttgttgccttcgccagccagaacgtatttaccatctttgtagaattcagaagctgcgcagtccatcgccaaagtgatgtctttgcccagttcataaccagcagctttaacagcttcagcgataacagccagagcttcagcgttggaacccaggttcggcgcatagccaccttcgtcaccaacagcagtgttcatgcctttcgctttcagaacttttgccaggtgatggaaaacttcagaacccatgcggatggcttctttcacagttttcgcgccaaccggctgaatcatgaattcctggatatcaacgttgttgtcagcgtgctcaccaccgttgatgatgttcatcatcggaaccggcatagagtatttgcccggagtaccgttcagttcagcgatgtgctcgtacagcggcatacctttagcagctgcagcagctttggcgttagccagagatacagccaggattgcgttcgcgccgaatttggatttgttttcggtgccgtccaggtcgatcatgatcttgtcaatgccagcctgatctttagcatctttgccaatcagcgcctgagcgatcgggccgtttaccgcagcaacagctttggttacgcctttacccaggaaacgggatttgtcgccatcgcgcagttccagagcttcacgggaaccagtagaagcaccactcggagcagctgccataccgacgaaaccaccctccagatgtacttcggcttcaacagtcgggttaccacgggagtcgatgatttcacgaccgatgatttttacgattttggacattaggttttcctcaagtcactagttaaactgaaactccagacaaacaacgcgtacccagggtacgcgttgccgctctaacttttttacttacttcgcctgacgtttctggaactcgctggcggctttcacaaagcctgcaaacagcgggtgaccatcacgtggagtagaagtaaactccggatggaactggcaagccacgaaccacgggtgattcggaacttcgatgatctcgaccaactgatcatccccggaacggcccgcaacgcgcagacctgcatcttcaatctgtttcaacagcatgttgttgacttcgtaacggtgacgatgacgctcaacaattgtcggcgcattgtacagctggcgaaccaggctatcgtcaaccaactggcactgctgtgcgccgagacgcatggtaccgccgagatcgctcttctcgctacgaacttcaacgttgccgttttcatcgcgccactcggtaatcagcgccacaaccgggtacttacagtctggcacaaattccgtagagttggcgttctccatgttggcaacatggcgagcgtaatcaattaacgccacctgcatacccaggcaaatgcccagataaggaatattgttctcacgcgcaaaacgcgcggtcgtaatcatgccttctacgccacgatagccgaaaccgccaggtacgaggattgcgtccagacctttaaggatttcaacgccgcgcgtttcaacatcttgactatcgatcagtttgatgttgacgctgacacgattcttcagcccaccgtgtttcagtgcttcgatcacacttttataagcatccggcagttcaatgtacttgccgaccataccgatggtgacttcacttaccgggttcgcttcttcgaagataacctgttcccattcggacagattcgcttccgggcagtttaagctgaatcgtttacaaatataatcgtccagcccctgagatttcaacaggcccggaattttatagatggaatcgacgtctttcagagaaataaccgctttttccggaacattacagaacaatgcaatcttcgcacgttcgttcgccggaacagcgcgatcactacgacaaatcaggatgtcaggctggataccgatggagagcagctcttttacagagtgctgagtcggtttggttttgacttcaccagacgctgccatgtacggcaccagcgtcaggtgcataaacagagtgtgctcacggccaatttcaacagccatctggcgaatcgcttcgaggaacggcaaggattcgatatcacctactgtaccgccgatttctaccagtactacgtcatgaccttcgccaccttccagcacgcgctctttgattgcgttagtgatgtgcggaataacctgcacggttgcgccgaggtagtcaccgcggcgttctttacgcagaacgtcagagtagatacgacccgtggtgaagttgttgcggcggctcattttggtacgaatgaaacgctcgtagtgccccaggtccaggtcggtttcagcgccgtcttcagtaacgaacacttccccgtgttggattgggctcatagtacctggatcgacgttgatgtacggatccagtttcatgatggtcacattgaggccacgggcttcaagaatggctgcgagggaggctgcggcaatgcctttacccagagaggatacgaccccgccggtcacaaaaatatagttcgttgtcatgctgaacctgagaagttaggttgaaaagacgatggaataaccaagacgggaaagcagtatacccgaacatgacctgtgccacaaactttcattatccctcctcttcgccagcgcactattgaaatcaggagtgagaaaatagcccctttggggtaaatgtttttgacgcaaatcaagcgcttgtcatttaaaaaatgacacaaatggcgcttgaccgcgtaattcccttagagatcaatttcctgccgttttacctgttgccagacttcttccattgtttcgaggtcaacacctgtcatttccagtccacgcgcggcaacaatacgctccacttcgcgaaaacgacgctcgaatttttcgttcgctttttgcaatgcgatttctgctttcgtccctaaatggcgagccagattaaccgtggcaaacagcaggtcccccatttcctcctccagtttagcctggtcgacaacagcctgccgcgcttcgtacatcacctcgtcgatctcttcgtagactttatcgactaccggaccaagcgtcgtccaatcgaagccaacgttggcgcaacgtttctggattttttgcgcacgcattaaagccggtaaactacgaggaatatcgtccagcgcgctatgctgcgctttctgcgcgcgctcttcggttttgatttgctcccaacgggcaagcacttcactactgttttcggcagaactatcagcaaaaacatgcggatggcgacgctctaatttatcgctaatagcagcgcaaatatcattaaagtcaaagcgcccttcttcctgagccatttgcgcgtaaaacaccacctggaatagcagatcgcccagttcaccgcgaagatcgtcaaaatcttcacgggcgatggcgtccagcacttcgtaggtttcttcaagggtgtaaggcgcaatggtggcaaatgtctgctctttatcccacgggcagccgttttccggatcgcgcaggcgctgcataatagtgagcaaacggtcgatttgattcattgaattgtcctgaaaattgcgggtctgtcaggtggaaacctgtgaccagaatagaagtgagttagtaacattacccaatcagtacgttaattttggctttaatgagttgtaattcctctggggcaactgttcctttcttcgttgctcctcttgcccgccaggcgatactttttacctgatcagctaacgctacgccatcacgttcctgaccggataaaacaacttcgaacggatatcctttactttgcgttgtacaaggaacacacagacacatacctgttttgttgttgtacatgaaaggactcaggacaacagctggacgatgtccagcttgctcgctaccttttgtcgggtcaaaatcaacccaaatcagatcgcccatatcgggtacgtatcggcttaccattaccagacttccttatctttcggctctccccagtcgatattctcgtggaggttttccggcgtgatgtcgttgaccagttcagcaagcgtaaatacgggctctttacgcactggctcaataattaatttgccatccaccaggtcaatcttcacttcatcatcaatattcagattgagcgcctgcattaacgtagccgggatccgcaccgccggactatttccccaacgctttacgctactgtggatcataaccctttcctcaaaccgctatcatatgtagatacagtatatatcaatctacattgtagatacgagcaaatttcggcttaactcccgtgcaaccgacgcgcgtcgataacatccggcacctggttgagtttacccagcacgcgccccagcacttgcaggttgtaaatctcaatggtcatgtcgatggtcgccagttgctgtttggtgtcgctacggctggcaacgccaagcacgttcaccttctcgttggcgagaatggtcgtgatatcacgtaacaacccactacgatcattagctaccacgcggaccaccaggctatatccggcggagtagctctcaccccataccgcgtcaacaatgcgttctggcgcatgggagcgcagttccgccagttgttcgcaatcggcgcggtgtacactaataccgcgcccctgggtaatgaagccgacaatctcatctccaggaatcggctggcagcagcgcgcgatgtggtgcatcaggttgccaacaccttcgactaccacgcgaccgttatctttactgcggttttgcggcgtgtagcttttttgctgaagttgcttcagcgcggcggcgtcctgctcttcggcactcggcttattaaattggctttgcaggaagttcaccatctgattgagacggatatccccgccaccaatcgccgccagcaactcgtcgacatcattgaagttgtaacgcggcagcagatgtttttctgcttctttcaggctgatccccagatgttccagctcgtcgtcaaggatttgccgcccagccagaatgtttttgtcacggtcctgtttacggaaccaggcgtgaattttgctacgcccacggctggttgtgacgtaaccgaggtttgggtttaaccagtcacggctggggttcggctgtttctgggtgataatttcaatctggtcgcccatctgcagctggtaggtgaacggcacaatgcgcccgccaatttttgccccgatgcagcggtgtccgacatcactgtggatgtggtaagcgaagtccagcggcgtacttcccgcaggcaaatcaacgacatcacctttcggcgtaaagacgtacacccggtcgtcaaagacctgactacgtacttcgtcgagcatttcgccggaatcagccatctcttcctgccacgcaatcagtttacgcagccaggcaatccggtcttcatgtccgctacgtgcgccgccagcagccgcgccctctttatatttccagtgcgcagcaacacccaactctgcatcttcatgcatctgtttggtgcggatttggatctcaacggtttttccacccggccccagaaccacggtatgaatagactgataaccgtttggtttcgggttagcgacgtaatcgtcaaactcatccggcaggtggcgatagtgagtgtgcactatccccagtgcggcatagcaatcctgtaaacgctcggcgacaatacgtaccgcacgcacatcaaacagctcatcaaaggcgaggttctttttctgcattttacgccagatgctgtagatgtgtttcggacgaccatacacttccgctttaacgccttcagctttcatctcagcgcgcagatgaccaacgaactcttcgatgtagtgttcgcggtcgagacgccgttcatgcagcagtttggcaattcgtttgtattcggttggatggaggtaacggaagcagtaatcttccagttcccatttcagttgtccgattccgagacggttagccagcggtgcgtagatgttggtacactcttttgccgccagtacacgttcatcttccggcgcatcttttacttcgcgcagatgagcaatacgctccgccagtttgatgactacgcagcgaaaatcatcgaccatcgccaataacatccggcgaacgttatcgacctgttcggaggaaacagaatcagtgtgcgtcgctttcagctggcggatcgccgccatatcacgcacgccgtgaataaggttaacgacgctcttaccgacgctctcacgcagcacatcttcgctgactacgttggcatccgccagagggaaaagcagcgccgcccgcagcgtgtcaatgtccatacttaatgtgctgaggatctccaccatctcaacaccacgccacaataacagactggcatccggatgcccctgcgtctgttgcagacaatacgcccaggtttcggctaagcactcacagctcttctggctggtaatacccagacttgcgatccatttttccggatcaaattcaccagccttattgatatgtgcacttcttaccgcaaccatcgtcctctcctttagggaccagacctgccgaaatcggcaaatcgcaattatttaacgcggctgaaaagtaccatgctttccagatgtcccgtgtgtgggaacatatccagcatcgccagtcgcgcaatggtatatcctgcttttaataacgcttcgctatcccgagccagcgttgcagggttacaggatacataaactatacgaataggttccagttttataatttgctgcataacacctgcggcacctgctcgcgccgggtccagcaacactttatcgaagccgtttttcgcccacggctgctttgtgacatcttcttcaagattttcgtgataaaacgtcacattctgtaagccattaagacgcgcattctgctggcctttttccaccagcgccggaacaccttctacaccgaccacactggcagcttgtgtcgccaatggcagtgtaaagttgcccataccgcagaacagatccagtacgcgatcttcaggttgcacatccagccattccaacgcacgcgctaccattttttggttcacacccgcattgacctgaataaaatcgcgcgggctaaaagttaagcgcaacccgttactgtcataccagggcatctcaccagagacggtttcgagtatctcactatcgggggcgagatacagatccaggccttcagaatggctaaagcgttccagtttttcgcgatctgcgctacttagcggtgcggtatggcgcaaaatcatcagcgtgccgctggttgcctgtaccagttcaacatgaccaagatggcgcatagcttgtaagctgcccagacatgccctgactttgggcagcaatgcttcaagttggggcgctaaaatggggcattgtttgacgtcgacaatgtcactggagcccgctttgcgaaaccccatctgaagttgctgtgttttcggtaagtagttcagacttaaacgcgcgcgacggcgatagccccagggaacatcggcgatcacttcagagacatcgtgtttcattaatcgggcgagtgccgcacttttgcttcgctgctgtaaatccacgctggcgtgttgttgctgacagccaccgcatacgccaaaatgaggacagcgtggcgtttcgcgttccgggctatcgcttaaccggcgtacgactttagcgcgggcatactgttttttatcttcagtaacagtaacttccgcgttttcctgcggcaataatccggggataaatagcgttttgccgttatgtcgcgccacgccctgaccaaaagagtcgaggtcgttgacactaacggttatgatctgacgcgtcgtcgtgcgtcgttttgcagagtagaattgcgccattggcgagactttctcaatttaacagtgtgaccttaattgtcccataacggaactccatgaccaactacagcctgcgcgcacgcatgatgattctgatcctggcaccgaccgtccttattggtttattgctgagtatctttttcgtcgtgcatcgctataacgacttgcagcgtcaactggaagatgccggtgccagcattattgagccgcttgcagtttctactgaatatggcatgagcctgcaaaatcgcgaatctatcggtcagttaataagcgtactgcatcgtcgccattccgatattgttcgcgcgattagcgtttatgatgaaaataaccgactctttgtcacctccaattttcatcttgatcccagtagtatgcagctcggcagcaacgtgccgtttcctcgccagctcactgtcactcgtgacggcgatattatgatcctccgcacgccgattatttctgagagttactcccccgacgaaagccccagtagcgatgccaaaaatagtcaaaatatgttgggatatattgcgctggagctggatcttaaaagcgttcgcttgcagcaatataaagagatctttatttccagcgtgatgatgctgttttgtatcggtattgcgcttatttttggctggcgcttaatgcgcgatgtaaccggtccgattcgcaacatggtgaataccgtcgaccgcatccgtcgcgggcaactcgacagccgggtggaaggatttatgctcggcgagctggatatgctgaaaaacggtatcaacagcatggcaatgagcctggctgcttatcacgaagagatgcagcacaatatcgaccaggcgacgtccgatctgcgtgaaacgctggagcagatggaaattcagaacgttgagttagatctggcgaaaaagcgcgcccaggaagcggcgcgtattaaatccgagtttctggcaaatatgagtcacgagctgcgtacaccactgaatggtgttattggctttacccgcctgacgctgaaaacagaattaacaccaacgcagcgcgatcacctgaatacgattgaacgtagcgcaaataatttgctggcaattattaatgatgttctcgacttcagcaaactggaagcaggtaagctgattctggaaagtattccattcccactacgcagcacgctggatgaagtcgttactctgctggcacattcttctcacgataaagggttagaactgacgctcaatattaaaagcgacgtgcctgataacgtgatcggcgacccgctgcgattacagcaaatcatcactaacctggtggggaatgcaattaaattcaccgagaatggcaacattgatattctggtagaaaaacgtgcgctgagtaataccaaagtgcagattgaagtgcagattcgggataccggcattggtattcctgaacgcgatcaaagccgcttattccaggccttccgacaggctgatgccagtatttcccgccgtcatggtggcaccgggctggggctggtgattacacaaaaactggttaatgaaatgggcggcgatattagcttccatagccagccgaatcgcggtagtactttctggttccacattaatctcgatctgaacccgaacattattatcgaagggccatccacccagtgcctcgcaggtaagcgcctggcctatgtcgaaccaaactccgcagcagcgcaatgcacgctggatattttaagtgaaacgccgctggaagtggtttatagcccaacgttctccgcgctgcctcccgcgcattacgacatgatgttgttaggcatcgcggtgaccttccgcgagccgctaacaatgcaacatgagcgattagcgaaagcggtaagcatgaccgatttcctgatgctggcacttccttgccatgcacaagtcaatgctgaaaaactcaagcaagatggtatcggcgcgtgtctgctgaaaccattaacacctacacgcctgttgcctgccctgacggaattttgtcatcacaaacaaaacacgcttttgcctgtaaccgatgaaagtaagctggcaatgacagtcatggcggttgatgacaaccccgctaacctgaaacttatcggcgcattgctggaagatatggtgcaacatgtggaactttgcgatagcgggcatcaggcggttgaacgggcgaaacagatgccgttcgatttgatcttaatggatattcaaatgccggacatggatggcattcgggcctgcgaactcatccaccaactcccgcatcagcaacaaacgccggttatcgcggtaacggcgcatgcaatggccgggcaaaaagagaagctgcttggcgcagggatgagcgattatctggcgaaaccgattgaagaagagcgattgcataatttgttgttgcgctacaagcctggcagcggtatttcctctcgcgtcgtgacgcccgaagtcaacgaaattgtggtgaacccgaatgcgaccctcgactggcaactggcactacgccaggcagcaggaaaaaccgatttagcgcgcgatatgctgcaaatgttactcgatttcctgcctgaagttcgcaacaaagttgaggaacagctggttggagaaaacccggaaggcctggttgatttgattcataaactgcatggcagttgcggctatagcggtgtgccacgtatgaagaatctctgccaactgatcgaacaacagctacgtagcggtactaaagaagaagatttggaaccggagctgctggaactgttggacgagatggataatgtcgcgcgcgaagccagcaaaattctcgggtaatggatgtcttgtcgagtagcaatcggctttttatgacgctggtttcagattggtgacaaagtgcctgtgtttatgccggatgcggcgttaacgccttatccggcctacaaaaccaattaaattcaatgaattaaaaaatgatgtagacctgatacatagcacaacaggctattttgcgtttagcatcagtctcaaaccggctccagatagagccggttttggttttctgtcttaacgcaccatgcacgggcgcttgttatcgaacgtccagccaggaatcagatactgcattcccatcgcatcgtcacgcgcgccaagcccgtgtttctgatacagctcatgggctttcatcacttgatccatatcgatttctacacccagccccggtttttctggcacctgtaccagcccgcctttgatctcaaacggttctttggtcaggcgctgattgccttcctgccaaatccagtgcgtatcaatagcagtaattttacccggtgcagcggcggcaacatgggtaaacatcgccagggaaatatcgaagtggttgttagagtgactaccccaggtcaggccaaattcatggcacatttgcgccacacgtacgctaccttgcattgtccagaaatgcggatccgccagcgggatatcaacggattgcagggagagcgtatggcccatttgccgccagtcggtggcgatcatattggttgcagtcggtagacctgtcgcgcgacggaactctgccatcacttcacgcccggagaaaccttgctccgcaccacacggatcttctgcataagccaggctacctttcaggtatttaccgattttaatcgcttcgttcaggctccaggcaccgttaggatcgagcgtaatacgcgcctgcgggaagcgttgcgccagtgccacaatagactcggcctcttcttccccggccagtacaccgcccttcagtttgaaatcgttgaagccatatttttcatatgccgcttccgccaggcgcaccaccgcatccggcgtcatcgcttcttcatgacgcaggcgataccagtcgcaactgtcatccggctggctttgatacggcagcggcgtggctttgcgattaccgacgaagaacagataaccgagcatttcgacttcgctacgctgttgaccatcgcccagcaggcttgccacgtttacccccagatgctgccccagcagatccagcattgccgcttctatcccggtaactacatgaatagtggtacgtaggtcaaatgtctgcaaaccgcgcccaccagcatcacgatcggcaaaagtattacgcaccagcgtcagaacgtttttgtattcacccagcgttttacctaccaccagcggaatcgcatcttccagcgttttacggattttctcgccgccgggaatttcccctacgccagtgtgaccagaattatctttgataatcacaatattacgcgtaaagaacggtgcgtgtgcaccactcagattcatcagcatactgtcatgacccgccaccgggataacctgcatttcagtaacaacaggcgtcgtaaattgagaactcatatttatgtcctttttcagaatcaatgacggccgaaaacgggacgtttacggtcaaaggtccagccggggatcaggtactgcatcggacctgcgtcgttacgcgcaccgccaggcagacgtttataggcctcatgtgccttttgtacctgttcccagtccagttccacgcccagaccgggcgcatcaggaacggcaatttttccgtttttaatctccagcggattttgggtcaggcgacaatcgccctcctgccaaatccagtgggtatcgatagcggtaggattacccggtgccgccgcgcccacatgggtaaacatcgccagagagatatcgaaatggttattagaatggcagccccaggtcagcccccagtcgtcgcaaagctgcgccacacggactgcaccggaaagcgtccagaagtgcggatcggcaagtggaatatctaccgcattgagcatcaccgcatgacccatttcgcgccagttggtggcgatcatgttagtcgcgacgggcaagccggtcgcccgtcgaaattccgccatcacttcacgtccggagaagccctgttctgcgccgcatggatcttcggcataggtaagaacatcattcagccctttgcataaagaaatggcttcatcaagcagccatgcaccgttgggatcaacggtaatccgcgcatccgggaagcgtttcttcaatgcacgaacagtgtcgatttcttgctcgccaggtaacacgccgcccttaagtttgaaatctttaaagccgtagcgatcctgactggcttccgccagacgcacaacggcttcgctgttcattgctttctgatgccgcaactgataccactcatggttgcccggcgtattttccacataaggaagatcggttttggtccgatcaccgatataaaacagataaccgaggacggtaatagcctcgcgttgcttgcctggccctaacagttcgcagaccggaacattcagcgccttacctagcaggtcaagcaaagcggcttccagcgccgccacggcgttaacgcgtaattcaaaggtccaggcacctttaccgaaggtatcaaaatcggcggcctgattacctttatgcacctgctggaccactttattcagtcgcgcaacttcctggcccagaaccatcggaatagcatcgacaagcgtctgataaatcacatctccgcccggcgcttcaccaatgccggtatgcccggcgttatcggtgagtaccacaatattgcgggtgaaatatgcgttatgtgccccaccaatattaagcaacatgctgtcatgcccggccaccggaatgactttcatatcagtaataacaggactggattgtgtcgccatcttattgccccgcaacaggtttcaactcgatacgcttgatatcgcccaccagcaccaggtagctcagtaccgcgattaaggcatgaacaccaacataaatcagcgccccattaaagctgccagtcgtgccaacgatataaccaattgcgattggcgtgacgatgccagaaatgttaccgaacatgttgaacaggccaccggaaagaccgctgatctcttttggcgcggtatctgccattactgcccaacccagcgccccgatgcccttaccgaagaaggccagcgccataaagccgatgatcatccactcaacgttgacgtagttgcagaacaccatcaccatgctcagcaacatgcccattacgatcggtgttttacgcgcaatgttcaggcttcccgtgcggcgcatcagccagtcggaaataatcccacccagcacaccgccgataaaaccgcaaaccgccggaacggaagccacaaagcccgctttcagaatgctcatcccgcgtgcctgcaccagataaaccgggaaccaggtaataaagaagtaagtcagggcgttgatacagtactgaccgatataaacgccgatcatcatccgactccctagcagctgtttgatctgcccccacttcacgctgaacggcactttaactttggtgttttgctgatccatattgatcagcgcaccacccgcggcgatgtactccagctctttcttatttacccccggatgttgatttggctcgtggatgactttcaaccagataaagctgatgacaatccccagaccgcccataaagaagaagacgtgactccagcccacttcatgcgtcagccagcccataatcggcgcgaagatcaccgttgcgaagtattgagcggagttaaaaatgctcaccgccgttcccctttcctgcgccggaaaccaggccgcaacaatgcgactgttgccggggaaagatggcgcttcagcaagcccgaccaggaagcgcagcgtaaacagggcaacgataatgccgaatccactaaagatatcgacgaagccttgcagcaaggtaaacatgctccagataaagatgctccagaagtagacgcgtttactaccaaaacggtccagcaaccagccaccagggatctgcccgataacataagcccaactgaaagcagagaacacatagcccattcccacgggatcaaggccgatatctttggccatttcgctaccggcgatagagagcgtagcgcggtcgccgtagttgaaggatgtgacgataaacaacatcaccactatccagtaacgagcatttgtgcgtttttccacactgctcgcagcctgacttaaagaactcattgttgcactcctgaaaattcgcgttagccacgctcactctggactgcgacatcgccaggaaatcagaggtgacgtagggtgttttttgccgtttttataggtcgttcgccgaatacggcgcgtgtttatatctggcaatagcagtataaaaagcgcgccatagcggctcaccgtgcaacaacacaacattaatgcgttcaatgaggcccgattttggcattagccctggacggtggaatccacttcacggaaatgaaaacaagaacaagaaaggaagggttaaaacgaagaaataaagaagagtatgaaatggatcgcttgactccaggcaaacgccagtaaaaatccgcgctatgaagcagtttttactggcatttgcctgaaaagattcgattcagcaccgctaaaacgacatttaccgctcgctgaacatatcaggacaacagcgtgccccactgttcgacccacggattactttccgtttccggttccgggttctcactggcgtcaatcaacagcatttcgccaacccgctgagcgctctgttcctgcaacaaggcatcgaactgtttgccgccattgcagaaattcacataactactgtcgccgagcgcaatcacgccataacgcagattcggctggaagcccagactatctttgattccctgaaagagtggcacaatgctatcaggaaggtcgccctgcccggtcgtggacgtaaccaccagaacatacttatcctgatagggcagccagtcgcttaattcaggatcttcaaataccgttgctttgtggccctgcgcggtcagaatcgcttccgcttcttcggccactaacagactattcccgtacatggtgccgacaaaaataccaatttccgccataccgttttctccctggattaggaacttatctctccatcctgaccgcttggcgcactgaactcaaccctttcattttcaggaagcagaccgcgccagccaaattgacttaacgcctgcatccaggtgtcgtccaggcccgcgtgaatagtcagcggctcgccagtaaaaggatgcgtcaaactcaactgactggcatgtagcattaaccgctggaggccaaaatgctcagcaccgctgcgattctggcgtaaatcgccatgtttgctatcgccaataatcggatgacgcaaatgggcaagatgtcggcgaagctgatgtttgcgtccggttttcggctccagttccaccaggccgtagcgcgtggtcgggtaacgtccggtcgctaccggcatttctacggtcgccagaccgcgataatgcgtcactgctggctgcgggcctttatcttcgcgggcaaatttatcagcgattttgtccagttcttccaccagtggataatccagcaccgcttcttccatcaaccagccgcgcacaatcgcatggtaacgtttctggatttggtgctgttcaaactgttgtgccagcagccgtccggcctcgctggataatcccatcaacaacacaccagaagtgggtcggtccagacgatgagcagtaaaaacatgctggcctatctggtcacgcacggtttgcatgaccactactttctcgtcgcgatccagccagctgcggtgaaccagccagccggagggtttatttaccgcaaccagccattcatcctgatagagtatttccagcattagctcgcatcatccgcaaaaagagcatccagtttttccagctcagccagaataagcgcgcgttgcggatggtccgtcgccagcgccatttcataatagggtgcaacggcaaaagcgcccggtaacggctgtttgttatctaacaaatcgtgcattcgcgggatcagcacccactgcaaccactccagtggttccatggtgtccataaagaacggttgggtactattaaattgatgcggctggggttcatcgtttcgccagtgctgatgttcacgcagtaacgcttcaagcgcctgcaactggagacgaacgcggtcatgagtggtcataaagcaacctcaataagaaaaactgccgcgaaggatagcaggaataaaaaaagggagcactgtattcacagcgctcccggttcgtttcgcagcattccagctacttttgttgctccctgctcatccttgacaacttttcctctggccttgcggccaatcgttcatcctgaactattgcttcctgctcacaccaccccgatgtgatacttcatcctgaagtgtccctggccttcctgacccaccgaatcatcctgaccggttctcattctccatcctggaggtgtcctttaacgcgtcctgcgtcatcctcttcgcttcatccagaagcctttccctgaaacaccatcctggtgtgtcctgcagaagtgtcatcatcctgatgttcacttcgttgtctgactccctgtcgacgaagatagaatcgtctttttcgcgaagtcttacaaggcgcttacagacaatgccttaaggaaaatttcatatgaaagttaagaattaacaatcaacattttgattttaaatgaaaataacgattcttatctttttaagtattcgcttatttcctggcgatctcctacagagtctgtaagagatctctcacaaccagatggggtatttggattacagaagaggcttaagttgattaaggaattccgcaagattactggctaaatgcgtccgtttacgtgttcccagcgtctctttgcacacttcaccggagagattacacacgctgatgacctctaactcttcttccagcgtcgcgataaatagtgtgggcggcagttttagccttttctgagtcaccagatgaccaatcagattttcctgcacccgacggaagtcgtcttcactccaggtttgcagcaatgtcagtttgatatcgccaaactgcgcgtgcatatccccggcaaactgagtcgtataaaaggtatgaattgtgggttgtatcacaatatcaaaagcgcgttcaaccgcgtttacattttgttccccggtaaacggctggggttgccagtatacggcatcttcggtagtactaataatgcacggactaggaacaccgtacagttcctcacttaacggccagcttttatgctcttcatgccacgcatcgcagtagcgtgcagtaaaatctttcagggcttgtgcggtcaaatcgtccactaatttctctcttcacttaaaccagatacacttgtcgtttagtttatctggtttatgacggtgaaacatgtcttcttatgcaaaccatcaggcacttgcgggcctgactcttggaaaaagtaccgattaccgggatacctatgacgccagcctactgcaaggcgttccacgcagcctgaatcgcgacccgctgggtctgaaagcggataacctgccttttcacggtacggatatctggacgctgtatgaactttcctggctgaatgcgaaaggtttgccgcaggtcgctgtcggtcatgttgaacttgattacaccagcgtaaatctgattgagagcaagagttttaagctctatctcaacagttttaaccagacgcgttttaataactgggatgaggtgcgccagacgctggagcgcgacttaagcacttgcgctcagggtaagattagcgtggcgttatatcgtcttgatgaactggaaggccagccgataggtcattttaatggcacttgcattgatgaccaggatatcactatcgataactatgaattcactactgactatctggagaatgccacctgtggtgaaaaagtagtggaagagacgcttgtcagccacctgctgaaaagtaactgcctgatcacccatcaaccagattggggtagcctccaaattcagtatcgtggacgccaaattgacagagaaaaactgctgcgttacctggtcagtttccgtcatcacaacgagttccacgaacagtgcgtggaacgcatctttaatgacctgttacgcttctgccagccagaaaaattgagcgtttacgcacgttatacccgtcgtggcggtctggacattaacccgtggcgcagtaatagcgattttgtcccaagcaccacaagactggttcggcaataaattttttctcaattttgcgtgctggattcacgcagaaggttgtgaaaggtcatcaggcagggctattgtaatcaaagggaatgacgatattcgtcccataaggagtttttcttgattacacatattagcccgcttggctccatggatatgttgagccagctggaagtggatatgcttaaacgcaccgccagcagcgacctctatcaactgtttcgcaactgtagtcttgccgtactgaactccggtagtttgaccgataacagcaaagaattgctgtctcgttttgaaaatttcgatattaacgtcttgcgccgtgaacgcggcgtaaagctggaactgattaatcccccggaagaggcttttgtcgatgggcgaattattcgcgctttgcaggccaacttgttcgcggtcctgcgtgacattctcttcgtttacgggcaaatccataacaccgttcgttttcccaacctgaatctcgacaactccgtccacatcactaacctggtcttttccatcttgcgtaacgctcgcgcgctgcatgtgggtgaagcgccaaatatggtggtctgctggggcggtcacagtattaacgaaaacgagtatttgtatgcccgtcgcgtcggaaaccagctgggcctgcgtgagctgaatatctgcaccggctgtggtccgggagcgatggaagcgccgatgaaaggtgctgcggtcggacacgcgcagcagcgttacaaagacagtcgttttattggtatgacagagccgagcattatcgccgctgaaccgcctaacccgctggtcaacgaattgatcatcatgccagatatcgaaaaacgtctggaagcgtttgtccgtatcgctcacggtatcattatcttccctggcggtgtgggtacggcagaagagttgctctatttgctgggaattttaatgaacccggccaacaaagatcaggttttaccattgatcctcaccggcccgaaagagagcgccgactacttccgcgtactggacgagtttgtcgtgcatacgctgggtgaaaacgcgcgccgccattaccgcatcatcattgatgacgccgctgaagtcgctcgtcagatgaaaaaaagcatgccgctggtgaaagaaaatcgccgtgatacaggcgatgcctacagctttaactggagtatgcgcattgcgccagatttgcaaatgccgtttgagccgtctcacgagaatatggctaatctgaagctttacccggatcaacctgttgaagtgctggctgccgacctgcgccgtgcgttctccggtattgtggcgggtaacgtaaaagaagtcggtattcgcgccattgaagagtttggtccttacaaaatcaacggcgataaagagattatgcgtcgtatggacgacctgctacagggttttgttgcccagcatcgtatgaagttgccaggcagtgcctacatcccttgctacgaaatctgcacgtaatctccgctcccccggtgacgtttgttgccgggttttctcgtttttggtcacttactcatcaactcatttcatttgttatatgaatgtttcttaccaccctcacgcgacaaatatcatcacagttaatatgtcatacaatttatgttgcaacgcaaacgtttccctattttcataaaccgtattttatcgctatgaaaaagaaattatcgccatgattaactaaaagtattgattttttcagttcaacctacatatattgcgcgccccggaagaagtcagatgtcgtttaatgggcaaatattgcccttaaattctcttttacttttgatttacagagtaaagcgttgggataatctatcttccaagtagattattgtatttgagatcaagatcactgatagatacataacttgtgtgtatctttccgccctcaaattattacggcggtaaatgattaagccatcgccgatagacagatttcatttttacggtcaggcaccttcccgggctgaactggctaaaagctgaattatttgcattcctccaggagaaatagatggaaacgactcaaaccagcacgattgcgagcaaagactctcgtagtgcctggcgcaagacagacaccatgtggatgctgggcctttacggcacggcaatcggcgcgggcgtgctgttcctgccaatcaacgccggtgttggcggtatgatcccgctgatcatcatggctatccttgcgttcccgatgacgttttttgctcaccgcggcctgactcgcttcgtactgtctggtaaaaacccgggcgaagacatcaccgaggttgtagaagaacactttggtattggcgcaggtaaactgattaccctgctctacttcttcgctatctacccgatcctgctggtttatagcgtggcaatcaccaataccgttgaaagcttcatgtctcaccagctgggtatgacgccaccgccgcgtgcgattctgagcctgatcctgatcgtgggtatgatgaccatcgttcgcttcggtgagcagatgatcgttaaagcgatgagtattctggtattcccgtttgttggcgtactgatgctgctggctctgtacctgatcccgcagtggaacggcgctgcactggaaacgctgtctctggacactgcatctgcaaccggaaacggtctgtggatgaccctgtggctggcaattccggtaatggtgttcagcttcaaccactctccgatcatctcttctttcgccgttgcgaagcgtgaagagtacggcgatatggcagaacagaaatgcagcaagatcctggcattcgcacacatcatgatggtgctgaccgtaatgttcttcgtcttcagctgtgtactgagcctgactccggcagacctggctgcggctaaagagcagaacatcagcattctgtcttacctggctaaccactttaacgcaccggttatcgcgtggatggctccgattatcgcgattatcgctatcaccaaatccttcctcggtcactacctgggcgcacgtgaaggcttcaacggtatggtgattaaatctctgcgtggtaaaggtaagtctatcgaaatcaacaagctgaaccgtatcactgcgctgttcatgctggtaacgacctggattgttgccaccctgaacccgagcatcctgggtatgattgaaaccctgggcggtccaatcatcgcgatgatcctgttcctgatgccgatgtacgcaattcagaaagtaccggcaatgcgtaagtacagcggtcacatcagcaacgtattcgttgtcgtgatgggtctgattgcaatctccgcaatcttctactctctgttcagctaagtcctttcgcgccgctttcgggcggcgcttcctccgttttaacgcgatgtatttcctatgattagcgtattcgatattttcaaaatcggcattggcccttccagttctcataccgttggaccaatgaaagcgggtaaacaatttaccgacgatctgattgcccgtaacctgcttaaagacgtgacccgcgtggtggttgacgtgtacggcagcctctctctgaccggtaaaggccaccacactgatatcgccattattatgggcctggcgggtaacctgccggataccgtggatatcgattccatccccagttttattcaggatgtgaatactcatggtcgcctgatgctggcaaacggtcagcatgaagtggagttcccggttgatcagtgcatgaacttccacgccgacaacctttctctgcatgaaaacggtatgcgcattaccgcgctggcgggcgataaagtcgtttacagccagacttactactctattggcggtggctttatcgttgatgaagagcattttggccagcaggatagcgcaccggttgaagttccttatccgtacagtagtgcagccgatctgcaaaaacattgtcaggaaaccgggctgagtctctctggcctgatgatgaaaaacgagctggcgctgcacagcaaagaagagctggaacagcacctggcgaacgtctgggaagtcatgcgcggcggtattgagcgcggtatttccaccgaaggcgtgttgcctggcaaactgcgcgttccacgccgtgctgcggcactacgccggatgctggtcagccaggataaaaccaccactgacccgatggcggttgttgactggatcaacatgtttgcactggcagtgaacgaagagaacgctgctggcggtcgcgtggtgactgcgccgactaacggtgcgtgcgggattatcccggcagttctggcgtactacgacaagtttatccgcgaagtgaacgctaacagtctggctcgttacctgctggtagccagcgccattggttctctttataagatgaacgcgagcatttctggtgctgaagtgggttgccagggtgaagttggcgtggcgtgcagtatggcggcggctggtctggcagaactattaggcgcaagcccggcgcaggtgtgcatcgcggcggaaatcgccatggagcacaacctcggtctgacgtgtgacccggtcgccggacaggtacaggtgccatgcatcgagcgtaacgccattgcggcagtaaaagcggtgaacgccgcacgtatggcgctgcgccgtaccagcgagccgcgcgtctgcctcgataaagttatcgaaaccatgtacgaaacaggtaaagatatgaacgccaagtaccgcgaaacctctcgcggcggcctggcaatgaagatcgttgcctgcgattaatcgctctccaaaggcctcgttttgcgaggcctcttcccgatttctcatccagccgtagcctgttccggcatcgaatgttacccttatcgcctgatctttaagggggttatcgtggctgttcatttgcttattgtcgatgcactgaatcttattcgtcgcattcatgccgttcaggggagcccctgtgtcgaaacctgccagcatgcgctcgatcagctcattatgcacagccagccaacccacgcggtcgccgtttttgatgatgaaaaccgcagtagcggctggcgtcatcagcgtttaccagattacaaagcgggtcgaccgccaatgccggaagagttgcacgacgagatgcctgcattacgcgccgcctttgagcaacgcggcgtcccgtgctggagtaccagcggcaacgaagccgatgacttagccgccacgctggcggtcaaagtgacacaggccgggcatcaggcaacgattgttagcacagataaaggctactgtcagttacttagtccgacattacgtattcgtgattacttccagaaacgttggctggatgcgccatttatcgataaagaatttggcgttcaaccgcagcagttgcccgattactggggacttgcggggatcagcagtagtaaggtaccgggtgttgcgggaatcggaccaaaaagcgccacgcagctgctggtcgagtttcagagtctggaagggatatatgagaatctggatgcggttgccgaaaagtggcgcaaaaaattagaaacccataaagagatggcgtttctgtgccgcgatattgcccgcttacaaaccgatttgcatatcgacggcaatttacagcaattgcggttggtacggtaacggcgagccggatacgccgcaaacgtcgtatccggcattatcacatcagcgcatttaccaggcggtatggtaaagctctacaatatcctcaagcgttgcttcacgcgggttgccaccggtacaaacatcatccagtgccgcctgcgccagtgccggaatgtcttccttgcgtacaccaacatcacgcaaatgtggcggaataccgacatcacggttgagagcaaacaccgcttcaacagcggcattacgcgcctcttccaggctcataccttccactttcacgcccataacgcgcgcgatatcgcggtacttctcaccggtaaagtcagcgttataacgcatgacatgcggtaacaggatggcgttcgcaacaccgtgtggagtgttataaaacgcgcccagtggatgcgccataccatgcaccaaccctaacccaacattgctgaagcccatacccgcaacatactgcccgagcgccatttcttctccggcatccttatcaccagcaacgcttcctcgcagcgccccagcaatgatttcaatcgctttaatgtgcagtgcatcggttagcgcccacgcgccacgggtaatatacccctcaatagcatgagtgagcgcatcgacacccgtcgcagctttcagcgctggaggcataccatccatcatgtcagcgtcaataaacgccacctgcgggatatcatgcggatcaacgcaaacaaacttgcgccgtttctcttcgtcagtgatcacgtagttaatggtcacttctgccgcagtacctgctgtggtaggaattgccagaatcggtacactgggtttattggtcggggaaagcccttccaggctacgcacatcggcaaactccgggttgttgctgataatgccaatcgctttacaagtatcctgtggagaaccaccaccaatagcgatcaggtaatccgcgccgctattctggaatacaccgagcccttctttgacgacagtaattgttgggttgggcactacgccgtcgtaaatcgcccatgccagccctgcagcatccatcttatcggtcactttcgccaccacgccgcattgcaccagcgttttatcggtgacgatcagcgccttctgataaccacggcgtttcacctcatcggttaaagccccaacagcaccccgaccaaaccatgccgtttcgttcagaatcattctgttagccatcatccttctccttgttgctttacgaaattactcttcaattcgtaacccataggttttgaatttctccagcactacggcaatctcttcatcgctcagcactggcaccgggtccgtaatcgccagggtcgtcaggtaaagttgcgccagcacttcaacttcatgcgccagccataacgctttttccagattcacctcacaagcgataagcccatgatgttgtaacaaagttgccttacgatttttgagagccagcgcaacatgttcagaaagttcgcgtgttccaaaggtcgcataaggcgcgcaaggaatagaattaccgccagccgccgcaatcatgtagtgaatagcggggatgcttcggttaagaatggaaactgccgtgcaatgaacggcatgattgtgaacaaccgcgttggcatccggtctgctttgataggctgccatatggaaacgccattcgctactggggagctttccttcctcatgtttaccgttgccatcaataaagacaatatggctctccgtcagtttttcatatggaatgcctgtaggcgtaatcagcatcccatcctgataacgtacactgacgttccccgctgtcccctggttcagtcccaggcgggtcatttccaggcaagtgtcaataatctgacgagcaagtttatttcgttccattagctacctctctctgattcaaaacagggcaataatgttgttcctttcacactattgaattagccgtttaattacccaccatcttcttcctgattaacaagaaagaaattcacaagcttatattttgtgacctggttcaactaatcacagtaaataactgcaagttctctttttataaccccattaaaaatgaccgctcttaaaaatatttatcaaaacggtcatttttctattcctccaagcccggaatgaccgttttcggcacaaacaattaatacggtcatctgatttgtgttttttatgatttattttctgaaacgggcatgaaatttcgattattaaagtgatggtagtcacataaagtcaccttctagctaataagtgtgaccgccgtcatattacagagcgttttttatttgaaaatgaatccatgagttcatttcagacaggcaaatattcactgatatgaagcccgaactcgctggttttgcacttttgaaaacataaccgattacgtgcttaagcttctgaacctaagaggatgctatgggaaacacaagtatacaaacgcagagttaccgtgcggtagataaagatgcagggcaaagcagaagttacattattccattcgcgctgctgtgcagtctgttttttctttgggcggtagccaataaccttaacgacattttattacctcaattccagcaggcttttacgctgacaaatttccaggctggcctgatccaaagcgccttttactttggttatttcattatcccaatccctgctgggatattgatgaaaaaactcagttataaagcagggattattaccgggttatttttatatgccttgggtgctgcattattctggcccgccgcagaaataatgaactacaccttgtttttagttggcctatttattattgcagccggattaggttgtctggaaactgccgcaaacccttttgttacggtattagggccggaaagtagtggtcacttccgcttaaatcttgcgcaaacatttaacagctttggcgcaattatcgcggttgtctttgggcaaagtcttattttgtctaacgtgccacatcaaagccaagacattctcgataaaatgtctccagagcaattgagtgcgtataaacacagcctggtattaagcgtacagacaccttatatgatcatcgtggctatcgtgttactggtcgccctgctgatcatgctgacgaaattcccggcattgcagagtgataatcacagtgacgccaaacaaggaagcttctccgcaagcctttctcgcctggcgcgtattcgccactggcgctgggcggtattagcgcaattctgctatgtcggcgcacaaacggcctgctggagctatttgattcgctacgctgtagaagaaattccaggtatgactgcaggctttgccgctaactatttaaccggaaccatggtgtgcttctttattggtcgtttcaccggtacctggctcatcagtcgcttcgcaccacacaaagtcctggccgcctacgcattaatcgctatggcactgtgcctgatcagtgccttcgctggcggtcatgtgggcttaatagccctgactttatgcagcgcctttatgagcattcagtacccaacaatcttcagcctgggcattaagaatctcggccaggacaccaaatatggtagctccttcatcgttatgaccattattggcggcggtattgtcactccggtcatgggttttgtcagtgacgcggcgggcaacatccccactgctgaactgatccccgcactctgcttcgcggtcatctttatctttgcccgtttccgttctcaaacggcaactaactgaacatattttccgaataaagtgaggaatctgtaatgaaaaaaatcagcttaccgaaaattggtatccgcccggttattgacggtcgtcgcatgggtgttcgtgagagccttgaagaacaaacaatgaatatggcgaaagctacggccgcactgctgaccgagaaactgcgccatgcctgcggagctgccgtcgagtgtgtcatttccgatacctgtatcgcgggtatggctgaagccgctgcttgcgaagaaaaattcagcagtcagaatgtaggcctcaccattacggtaacgccttgctggtgctatggcagtgaaaccatcgacatggatccaacccgcccgaaggccatttggggctttaacggcactgaacgccccggcgctgtttacctggcagcggctctggcagctcacagccagaaaggcatcccagcattctccatttacggtcatgacgttcaggatgccgatgacacaagcattcctgccgatgttgaagaaaaactgctgcgctttgcccgcgccggtttggccgtcgccagcatgaaaggtaaaagctatctgagcctgggcggcgttagcatgggtatcgccggttccattgttgatcacaacttctttgaatcctggctgggaatgaaagtccaggcggtggatatgaccgaactgcgtcgccgtatcgatcagaagatttacgacgaagccgaattggaaatggcactggcctgggctgataaaaacttccgctatggcgaagatgaaaataacaaacagtatcaacgtaatgccgagcaaagccgcgcagttctgcgcgaaagtttactgatggcgatgtgtatccgcgacatgatgcaaggcaacagcaaactggccgatattggtcgcgtggaagaaagtcttggctacaacgccatcgctgcgggcttccaggggcaacgtcactggaccgatcaatatcccaatggtgacaccgccgaagcgatcctcaacagtagttttgactggaatggcgtgcgcgaaccctttgtcgtggcgaccgaaaacgacagtcttaacggcgtggcaatgctaatgggtcaccagctcaccggcaccgctcaggtatttgccgatgtgcgtacctactggagtccagaagcaattgagcgtgtaacggggcataaactggatggactggcagaacacggcatcatccatttgatcaactccggttctgctgcgctggacggttcctgtaaacaacgcgacagcgaaggtaacccgacgatgaagccacactgggaaatctctcagcaagaggctgacgcttgcctcgccgctaccgaatggtgcccggcgatccacgaatacttccgtggcggcggttactcttcccgcttccttaccgaaggcggcgtcccgttcaccatgactcgtgtcaacatcatcaaaggcctgggaccggtactgcaaatcgcggaaggctggagcgtggaattgccgaaggatgtgcatgacatcctcaacaaacgcaccaacagtacctggccaaccacctggtttgcaccgcgcctcaccggtaaagggccgtttacggatgtgtacagcgtaatggcgaactggggcgctaaccatggggttctgaccatcggccacgttggcgcagactttatcactctcgcctccatgctgcgtatcccggtatgtatgcacaacgttgaagagaccaaagtgtatcgtccttctgcctgggctgcgcacggcatggatattgaaggccaggattaccgcgcttgccagaactacggtccgttgtacaagcgttaatacattactccctgatgtgatgcccggtcgctccggctaccgggcctgaacaagcaagagtggttagccggataagcaatgttatccggctatattgcaggagcgattatgaaacaagaagttatcctggtactcgactgtggcgcgaccaatgtcagggccatcgcggttaatcggcagggcaaaattgttgcccgcgccagtacgcctaatgccagcgatatcgcgatggaaaacaacacctggcaccagtggtctttagacgccattttgcaacgctttgctgattgctgtcggcaaatcaatagtgaactgactgaatgccacatccgcggtatcgccgtcaccacctttggtgtggatggcgctctggtagataagcaaggcaatctgctctatccgattattagctggaaatgtccgcgaacagcagcggttatggacaatattgaacggttaatctccgcacagcggttgcaggctatttctggcgtcggagcctttagtttcaatacgttatataagttggtgtggttgaaagaaaatcatccacaactgctggaacgcgcgcacgcctggctctttattagcagcctgattaaccaccgtttaaccggcgaattcactactgatatcacgatggccggaaccagccagatgctggatatccagcaacgcgatttcagtccgcaaattttacaagccaccggtattccacgccgactcttccctcgtctggtggaagcgggtgaacagattggtacgctacagaacagcgccgcagcaatgctcggcttacccgttggcataccggtgatttccgcaggtcacgatacccagttcgccctttttggcgctggtgctgaacaaaatgaacccgtgctctcttccggtacatgggaaattttaatggttcgcagcgcccaggttgatactagcctgttaagtcagtacgccggttccacctgcgaactggatagccaggcagggttgtataacccaggtatgcaatggctggcatccggcgtgctggaatgggtgagaaaactgttctggacggctgaaacaccctggcaaatgttgattgaagaagctcgtctgatcgcgcctggcgcggatggcgtaaaaatgcagtgtgatttattgagctgtcagaacgctggctggcaaggagtgacgcttaataccacgcgggggcatttctatcgcgcggcgctggaagggttaactgcgcaattacagcgcaatctacagatgctggaaaaaatcgggcactttaaggcctctgaattattgttagtcggtggaggaagtcgcaacacattgtggaatcagattaaagccaatatgcttgatattccggtaaaagttctcgacgacgccgaaacgaccgtcgcaggagctgcgctgttcggttggtatggcgtaggggaatttaacagcccggaagaagcccgcgcacagattcattatcagtaccgttatttctacccgcaaactgaacctgaatttatagaggaagtgtgaaatgctgaaaacaattagcccgttaatttctcccgaactattgaaagtgctggcagagatgggacatggagatgaaattattttttccgatgctcactttcccgcccatagcatgggaccgcaggtgatccgcgctgatggcctgttggtgagcgacttgctccaggcgattatcccgttatttgaactggacagttatgcaccgccgctggtgatgatggcggcggtagaaggtgacactctcgatcctgaagtagaacgacgttaccgtaatgcgcttagtctacaagccccgtgtcctgacatcatccgcatcaatcgttttgcgttttatgaacgggcgcaaaaagcctttgcgatcgttatcacaggcgaacgagcgaagtacgggaatattcttttaaaaaaaggggtaacaccgtaatctcataccggtacgcccgcatgacgcgggcggttatcgaatgatggggtgaaaaatatgaaagcggcacgccagcaagcgatagtcgacctgctgctgaaccataccagcctgaccacggaagctctctctgaacagctaaaggtcagtaaagaaaccattcgtcgcgatctcaatgaattacagacgcagggtaaaattctgcgcaatcatggacgcgctaaatatatccaccgtcaaaatcaagacagtggcgatccctttcacatcaggctgaaaagccattatgcgcataaagcagatatcgcgcgcgaggcgctcgcgtggattgaagaagggatggtgatagccttagacgccagtagtacttgctggtatctggcacgccagttgcctgacatcaacattcaggtcttcaccaatagccatccgatttgccatgaactcggtaaacgcgaacgcattcaactgatcagttccggcggcacacttgagcgcaaatatggctgttacgtcaatcccagcctgatttcccaacttaaaagcctggaaatcgatctgtttattttttcttgtgaagggatcgatagcagcggcgcactgtgggactccaatgcgatcaacgctgattacaaaagcatgctattaaaacgtgccgcgcaaagcttgttattgattgataaaagtaaatttaatcgtagtggggaagcccgcatcgggcatctggatgaggtaacgcacattatttctgatgagcgccaggttgcaacttctttggtaacagcctgacggaaagggtagcaggccggagacgacgccccggccttgcctgttatcgctcgtcgcgacgaccacccaccgcagcccagatgcggcggacgtgcaccgtcacttcttcgcgatcgtgatacaactgccgcgcctgaatctgagcatttatgccatgttcatcaagctgtgcctgaatatacgccagattgtgactcacttcttcgtagcgttttttcatcggcagtttgaggttgaaaatggtttcacggcaccagccattaaccagccactgtgccatcaatgccgcaactttcgccggtttttcaaccatatcgcataccatccaggagatattgctgcgcgtcggacggaatttgaaaccgtcttcccgcagccacgtcacctgtccggtatccatcagactttgcgccatcgggccgttgtcgacggaataaacccacatgttgcgcttcaccagttggtaggtccagccgccagggcaagcgcctaaatccaccgcccacatcccgttcgccaggcgttcatcccactcatccgcaggaataaacacatgaaatgcctcttccagtttgagcgtggaacgactcggcgcatctgccggaaatttcaggcgcggaatgcccatatagaacgggctattattgttgctgtaactgtaaccggtatagcagcagcctggtgcaataaagaatacatgcacaaccggacgcttcggcgtttcatagttcgccagcaccccggcatcgcgcaaggcagcgcgtagcggaacagtaaatttacggcagaatttcagtaactctttgctttcgttggtatcggcaacttcaacacgcagttcaccgcccttctctactacgccctgtaacatgccgacaatgggggtaatacgatcttctggcggcaaatgctgcaggagttcccccaccacaaaccactggcgggcaaaaattaaactactgaacggcagctcacggattaacttatcgccatcatcaggttgataacattcataaatgacataacccgcattctctttcacgcgggcaaaaccgaaaatttcccgctggccggctttatcggtaatttctgcggcgcactctttttcaaagcccggacggcacagcaatacaaccttattcatgacttacgcccttgcgctttaaacggatagcaccaactaacattaacgcccagcccgcgaggaagctcacgccgccaaccggagtgacaaacgcccacaaacgcagatgggacagcgccaggcaataaaggctgccgctgaacaacaccgtgcctaacgcgaggaaaacgctactccagtaaaaccagatactgatgcgacgctgcattgccaccgccagacctaagatcgccagcgtatgaaacgcctggtattcgaggccggtctggatccagcccatctcaacggcccccatggttttacttaacacatgcgcgccaaaagcgcccagagccacaaaaatgaagccgctaatggcggcgaaaatcagcataaaacggctggtcatggtcgtaccctacgtaaattattgttcataacgaaagcggaatttttcttgttcagcagcggctttcgccaggatccattggcgaaaggcggctattttacccagttctgcctgactgtcatgacaaaccagataaaaagcatttttactgaccagaacatcattaaacgggcaaacaagacgtccggcctcgatttcagattgcgccatcacgttatttgccagcgccactccctgcccgtggatagccgcttgcagcaccatggcgctatggctaaaaattggcccttgctgaacgttgatatgatttaaccccaactgtcgggtatatgtctgccagtcacggcggctagcatcatgtaataacgtatgtttagccagatcttccggtgtcttcaagggtttttcgccagtcagcagtagcgggctacacaccggcaataaatattcggcgtacagtttttccacccgtagccccggccagttgccccgaccataaaatatcgccacatcaacatcatccgccagcttatcttcctgacgatcaaccgcctggattcgaacgtcaattcccggataagcactattaaagctggaaagtcgcggaaccaaccaatgaatggcgaaactggggagtaaactgaccgtcaacgcccccttggcgctacgggcctggagtttacgcgtcgcttcggttaattggctaaatatctctttgatatcgaggaaatagctttgcccttcctcggtcagcaggagactacgattacggcggcggaacagttttagccccaaaaaatcctcaagagacttgatttgatgacttactgcggcttgggtcacaaaaagctcttctgctgcgcgagtgaaacttaaatggcgtgctgcggcatcaaaaactcgtaaggcatttagcggtggtaatcgtttagacatggctattaaactttgatgttaaatgaatttaacaattagatcacactatgtaacctattagtttttttaatctgagccattataaattgtccgttgagcttctaccagcaaatacctatagtggcggcacttcctgagccggaacgaaaagttttatcggaatgcgtgttctggtgaacttttggcttacggttgtgatgttgtgttgttgtgtttgcaattggtctgcgattcagaccatggtagcaaagctaccttttttcacttcctgtacatttaccctgtctgtccatagtgattaatgtagcaccgcctaattgcggtgcttttttttaccttgcgatcgcgaattactgatccagttcgaccatctctttcacgtcagtacggttgatctgctgtttgttgccattagcgtctttatagctaatcataccggtatcgttatcagtctgtggtttgccgtcagagacgatggtacgtccgtcattggtgtgcatcacatagttgctaccggaacaggcgctcagggcaaaagtcagcatacaggcagaaataattgcggcagtctttttcatcatcttctccttaaagcgattaataaatcttaatagtattgattaacaggctaaaattaacgcctaacactattcagcatatgttacttacgcggcttcgccaggatatccagataattctgatggttagcactctccttgtatcaaagtgaattttgcgtcacgatcggtgcatcaagccgaggagtaccatgaacgtttttaatcccgcgcagtttcgcgcccagtttcccgcactacaggatgcgggcgtctatctcgacagcgccgcgaccgcgcttaaacctgaagccgtggttgaagccacccaacagttttacagtctgagcgccggaaacgtccatcgcagccagtttgccgaagcccaacgcctgaccgcgcgttatgaagctgcacgagagaaagtggcgcaattactgaatgcaccggatgataaaactatcgtctggacgcgcggcaccactgaatccatcaacatggtggcacaatgctatgcgcgtccgcgtctgcaaccgggcgatgagattattgtcagcgtggcagaacaccacgccaacctcgtcccctggctgatggtcgcccaacaaactggagccaaagtggtgaaattgccgcttaatgcgcagcgactgccggatgtcgatttgttgccagaactgattactccccgtagtcggattctggcgttgggtcagatgagcaacgttactggcggttgcccggatctggcgcgagcgattacctttgctcatagtgccgggatggtggtgatggttgatggtgctcagggggcagtgcatttccccgcggatgttcagcaactggatattgatttctatgcttttagtggtcacaaactgtatggcccgacaggtatcggcgtgctgtatggtaaaagtgaactgctggaggcgatgagcccctggctgggcggcggcaaaatggttcacgaagtgagttttgacggcttcacgactcaatctgcgccgtggaaactggaagctggaacgccaaatgtcgctggtgtcataggattaagcgcggcgctggaatggctggcagattacgatatcaaccaggccgaaagctggagccgtagcttagcaacgctggcggaagatgcgctggcgaaacgtcccggctttcgtagtttccgctgccaggattccagcctgctggcctttgattttgctggcgttcatcatagcgatatggtgacgctgctggcggagtacggtattgccctgcgggccgggcagcattgcgctcagccgctactggcagaattaggcgtaaccggcacactgcgcgcctcttttgcgccatataatacaaagagtgatgtggatgcgctggtgaatgccgttgaccgcgcgctggaattattggtggattaatgacaaacccgcaattcgccggacatccgttcggcacaaccgtaaccgcagaaacgttacgcaataccttcgcaccgttgacgcaatgggaagataaatatcgccagttgatcatgctggggaaacagcttccggcattgccagacgagttaaaagcgcaggctaaagagattgccggatgcgaaaaccgcgtctggctgggatatacagtggctgaaaacggcaaaatgcatttctttggcgacagcgaagggcgcattgtgcgcggcctgctggcggtgttgttgactgccgttgaggggaaaaccgccgccgagttgcaggcacagagtccactggcattgtttgatgagctgggattacgtgcgcagcttagcgccagtcgcagccaggggttaaatgcgttaagcgaggcgattatcgctgcgacgaagcaggtttaagcacagaaccgggtcggataagacgttcgcgtctcatccgacctgattgtttaaccctgacgcgccgctttcgccatcatcttcttcagcgcatgagaaaccgcaacaaacccaaaggtggcggtcaccatcgttgccgcgccaaatccagatgcacaatccatccgcttcggcccttctgccgtggctttcatcgcacacaccgtaccgtcactctgcgggtacaccagcgcttcagtagaaaacacgcaatccacgccgagcttacctttactgtttttcactacgccaaaatcgcttttcaggcgctcgcgcaacttcgccgccagcgggtcctgaatcgttttcgccagatcggtaacctgaatctgcgtcggatcaatctgcccacccgcgccaccggttgtgaccagtgggattttattgcgccgacaataagcaatcagcgccgctttgggccgtacactatcaatggcatcaatcacgtagctataacccacgctcatatactgcgctacgttatccggcgtcacgaaatcatccaccaccgttacacggcactccgggttaatctggcgaatacgctccgccataacttccgcttttgccagcccaacgttatcgcgcagggcatgaatttgccgattggtattggtgacgcacacatcatccatatcgataagcgtgattgcgccaatccccgtgcgcgccagcgcttccgccgcccaggaaccgacaccaccgataccaaccacacaaatatgcgcgtcagcaaacagttgcaacgctttttcaccatacagacgcgctgtgccaccaaaacgctgacgccatgcatcactaattaccacagacatagcacctcagaattaaaaagggcgaggttatccctcaccctaaacgcataaatgcctgatgcgctacgcttatcaggcctacataactcctgcaatattttggatttgcatgatttgtaggccggataaggcgttcacgccgcatccggcatgaacaacgcgcacttagtcaataatcaggatgtgaggttacccctcaccctgtcatatccgtaaaaacggcatacagaatatcacatcagccgctaaagacgttacctgcgcccggggcggttttcagcacccagacacgtccatagtggttgtaccaacctgcgcggtgtccggcttccggcccgatcccttgatagatatcgaagtgttggcctttgattgcaccaccgacatccagcgccaccatcagacgcagttcgtactgaccattaaatttgccgttattatccagcaacggcacttctgccagcaaggtagtacctggcggaataatggaacgatcagaggcaacactcgcgcgaccaaccagcggcaccgcacttgcccctttcaccggagcaaaagattgcggtttaaagaagacgaaagacgggttctgttccagcagctcgcgaacctcggcttcactgtgtgtttcgccccagtgacgaatcgcctgcatgctcatatcttcttttttcacttcgccacggtcgatcagcaccttaccaatgctgcgataggcatgaccgtttttccctgcatagctgaaaaagttaagcggactgccatcaccaaagtcgatatacccactaccctgcacatccataatgaagttatccatcagggagttactgtaagcgagaatatatttatcactcaatgcccccgcgtagatctccgcacgagacggcagacgaccacgttttggcggcatacggtaaataggatactggaactcgccctggcgggtatggcgcgcctgaattaccggcgtgtaataaccggtaaactgcacgttaccatagttgtcggcaccttccatctgccaggcatcaatgccgaactggcgcatattgcgggtatcaccgcctgcgcgcagccactcttgcaccgcgttataaacattactctggttgccatacagacgcggactgctattacggatatggttaatttgctcggcaaaatcaccggcgttaatcggcgcgccaacggcatctggctggttcaccagagagaaaggctgggtaaatttcccgtctttatattgctgtccgcgatcggttggtttggaagagcaggcggcaagcattgccacaaccgtgcccataagaaggtactttacccaacgtcctttcattgttctcttcttcaggttaaaaaataaggcgcaacgaagataacaaaccgccgcgtttaatgaaatgagcagcctctccctgacgcaaattttgcacaaaaaataggctttagtgatttgtttttgttcaaaatcatgccaaatccgtgatcggggtaaaaaaaaggttgcatgaaaacgcgagcggagtatagtgcgcatccacggacgcggggtggagcagcctggtagctcgtcgggctcataacccgaaggtcgtcggttcaaatccggcccccgcaaccaattaaaatttgatgaagtaaagcagtacggtgacgcggggtggagcagcctggtagctcgtcgggctcataacccgaaggtcgtcggttcaaatccggcccccgcaaccaatcaaatttgatgaagtaaaagcagtacggtgacgcggggtggagcagcctggtagctcgtcgggctcataacccgaaggtcgtcggttcaaatccggcccccgcaaccaattattgaacaccctaacgggtgtttttttgtttctggtctcccataaaaaagcgccattcagcgcctttttatcatccccttctcgccagcgtcgccccatcggcaaaatacgctttaatccccgcaagaatagactccgcaacttcctgctggaaagtcgccgttttcagtttacgctcttcctcaacgttactgataaacgccgtttcgaccagaatggagggaatatctggtgcctttagtacggcaaacccggcctgttcaacttgatttttatgcagcttgttgattttaccgagcttattcagtaccgctttaccaaacttcaggctgtcggcaatggtcaggctctgtaccatatcgaacatggtgtggtcgacatagcggtcaccgcttttgctcacgccaccaatcaagtcgctggcgttctgggtttgtgccagatattttgccgcagtactggttgcacctttggtactgagcgcaaacacagaggaaccgctcggctgacgactggtaaaggcgtcggcatggatagagacaaacaggtcagcacgctgtttctgggcttttgctacgcgcacttgcaatggaatgaagatgtcttcattgcgcgtcatgtacaccttcatattgccctctttctcgatcagagagcgcaaacggcgagctatttgcaataccacatctttttcgcgcgttttgtatttccccaccgcaccggagtcttcgccaccgtggccagggtcaagcataatgacaatcggacgatcgcgccctgctttacccggttgtggaccactttgcgctggcggcacctgcttttcgaggtcgcctttgttgtaatcctccagcagcgccagcagcgggtcctgcatatcctgtgcattggccggatagaggtccatcaccagacgctctttaaacccggcgaccggcgcaagggcaaacagctgcggttttacgttttgctttaattcaaaaaccatccgtacggtttgcgggtcaaattgcccgacgcgcgcgctcttgatgaacgggtcgtctgcacgaatttgtgccgccatccccttgagtacgctgttcaggtttacatcttcgatatccaccaccacgcgttcagggttactcaacgcgaactgcttatatttcagctgacgattactttccaccgtcacgcgggtgtagctggacgcaggccagacgcgcaccgccacgacctggctgaccgcagccagactgacctgacttacgctcaatagccacatggcacccgcgccttgcagtaaacgacgacggctgattgcagtgttggatccactcatgcctctcccgagcaaaagaaatctaagctgtgtaacaagtaaacgactaatttgaccggaaactttagcgaaagacgcataatctgtcatctaataaacggtaaacattctttttatattcacggcattactgataaaaaagtcgctctcgcataaaatttacacttgcaccctgcgaaaaaacagaataaaaatacactaatttcgaataatcatgcaaagaggtgtgccgtggtaaaggaacgtaaaaccgagttggtcgagggattccgccatagcgttccctatatcaatacccaccggggaaaaacgtttgtcatcatgctcggcggtgaagccattgagcatgagaatttctccagtatcgttaatgatatcgggttgttgcacagcctcggcatccgtctggtggtggtctatggcgcacgtccgcagatcgacgcaaatctggctgcgcatcaccacgaaccgctgtatcacaagaatatacgtgtgaccgacgccaaaacactggaactggtgaagcaggctgcgggaacattgcaactggatattactgctcgcctgagcatgagtctcaataacacgccgctgcagggcgcgcatatcaacgtcgtcagtggcaattttattattgcccagccgctgggcgtcgatgacggcgtggattactgccatagcgggcgtatccggcggattgatgaagacgcgatccatcgtcaactggacagcggtgcaatagtgctaatggggccggtcgctgttagtgtcactggcgagagctttaacctgaccagcgaagagattgccactcaactggccatcaaactgaaagctgaaaagatgattggtttttgctcttcccagggcgtcactaatgacgacggtgatattgtctccgaacttttccctaacgaagcgcaagcgcgggtagaagcccaggaagagaaaggcgattacaactccggtacggtgcgctttttgcgtggcgcagtgaaagcctgccgcagcggcgtgcgtcgctgtcatttaatcagttatcaggaagatggcgcgctgttgcaagagttgttcagtcgcgacggtatcggtacgcagattgtgatggaaagcgccgagcagattcgtcgcgcaacaatcaacgatattggcggtattctggagttgattcgcccactggagcagcaaggtattctggtacgccgttctcgcgagcagctggagatggaaatcgacaaattcaccattattcagcgcgataacacgactattgcctgcgccgcgctctatccgttcccggaagagaagattggggaaatggcctgtgtggcagttcacccggattaccgcagtagtagtaggggtgaagttctgctggaacgcattgccgctcaggcgaagcagagcggcttaagcaaattgtttgtgctgaccacgcgcagtattcactggttccaggaacgtggatttaccccagtggatattgatttactgcccgagagcaaaaagcagttgtacaactaccagcgtaaatccaaagtgttgatggcggatttagggtaagcgatgaaaatcgtcggatgcgacatgcgtaacactcgtacgtcgcatccggcaattacgtttattcccgactactaaacaacgccgccagaccactgcgccgctcagtacgagtggcgattgccgcacttaatatgcgctcatcggcatacaggctcagacggcgacgcgcgcgggtcaccgcggtataaaccagctctcgcgttactaccggcgtgcgttggctcggcaaaatcaacgccgcatggtcgaactcgcttccctggcttttatgtaccgtcatcgcccacgtagtttcgtgctctggcaagcgactcggttgcacagacttaatattgccgtccggcatcgcaaaccagacgcgcgtcccctgcccgcgatccagcgcaataccgatatcgccattaaacaacccaagcgcgctgtcattacgggcaatcatcaccggtcgaccttcgtaccaacgagagtgcggatgacgatgaattttgcgcttctgttgcataaactgctcaattcgctcattcagtccagccacgccaaacggcccttcccgcagggcgcacaaaagctggtactcattgaacgcctgaatgattaaatccggctcggcacgcgcttgcagcagatccagataacgtccgtaacccgcaagagcttcctcaagcatcgcaatataatcttcgccgctctgtaaaagccgtttttcgatatcagtaaaatcctgctgaaaaacggttttcactgccgttttatcaccacggttgatcgccgcagctaactgaccaatgccagaatcgctgccgaaacgatagcttttttgcagcaggcagagactgtcgcgcaaagatgccgcttctgtgccggttcctgccggaacgtgagtccccgtcaggcggcttagctgcctggcacgctcggcggtaaagcccgcgttggcataagcgcagatatcgcccagcacagccccagcctcaacgctggccagttgatcacgatcgccgagaaagatcactcgcgcatgatcgggcaaggcgtcgatcagtctgctcatcataggcagatcgatcatactcgcttcatctaccaccagcacatcaagatgcagcgggttaccggcatgatgacgtaaacgctggctacccggctgcgcgcccagcaatcggtgcaaagtgctggcatcttccggaatgcgtttcttttgttcatcggtcagcggtaactgtcgcaaagccttgccgagagattcggttaagcgcgcggcagctttacccgttggtgcagccagacggatacggcagcgttcgccgtcggccatttgaattaacgctgccagcaacttcgctacggtggtcgttttaccggtgccagggccgccggaaatcacgctgatccgccgcgtcagcgccactgccgccgcaactttttgccagttaatttcatcgcttactggaaaaagtttgtccagggtttgcgccagtagagcttcatcaacctcaatggcatgattcacttcgttgaaaaagcgtgccactgtgcgctcgttacaccacatgcgattcaaataaagacgatcgccacagaggatcatcggcgtgggttcatctcccctgctgaccgcttgagaagccagcaagcattcttcccaattttgtagctcaccgatttcactgacacaggtcgccaacagcggatggctcgcctcgttattttccagtcgactaagcggcaaacaaacgtgtccctctccggcatcatgacttaacagtgccgccgcgagggtgacggcaggatgttcatctcccgccacggtcagggcaaattgcacatccagcgggcgtagctgtttgtgctccacagcttccagtaattgcttttgcaatttcattacgcctcctccagggtcataccggcaaacatctcatccatcagggcaatcaacccggcgttgggtcgggttgtgtaaatcccctgttgcggatgttctttatcaacgccacgcaggaacagataaataacgccgccaaagtggtgctcatagtcgtaatcagcaatgcgatggcgcagataacgatgcagcgccagggtataaagctgatattgcagatcatagcggtgtgcctgcattgccgctgccatagcctgttgggtgtaagcgctactgtcttcacccaaccagttggatttatagtcgagcaggtaataacgcccttcgtggcggaacaccaggtcgataaagccttttaacatgccacgtacctgcatgaactccagcggcgggcagcctgcggatagcgggtcaaactggcggattaacgtatcaagctgactggcgataagcggttcactaatcggcagataaaactccatctccacctgtttattgcgggcggaaagttgactcaggcttacgccggtttcattgagaggtgcctggaggacagccgtgatccactcggtcaataccggttcccactggctttcaaagccgccgagttccagtttttcccgcacccagttcgggtcaaccggctgggtaaaatccaggtcttcaaacaaactgtgcaagaacgtccccggactcgcaccgcgcggaaactgatgtggtgttaacgtcggttcttcaacgacgctggcaacgcctgcagcatcgacatccagccgaggcatcaaatcctgggcgataccgtgaccacgctgttgcaaaccagagtagctggtgacgcgccagttatcgccgggcaatcgttgtaacgtcttcgcattcagctctgctgtagaaacatcattaacctgccagggttggttatcaccagtttgtgccgtttgccaggcaatatcatcatcgcataacgcttcaatacaggtgcgaagccctgccgcatcttgcggttcccctttttgcagcaaacgcccgagcgcactttggtggacgtcggtgtcaccttttttatcgccacgacggcgcaccagcggtgcaacgccgagactgcaatgccaaacgctacgtgtcagcgccacgtaaagcaaacgcagatcttccgccagacgttcggcctccgcgaggtcgacgctttctggcgcagcattaagatccagaactgcctcaaagctgtggcgatcgtgataaaacgcctgctcctggacgcggaaattggtgataaacggcagccagaccaatggatattccagccctttgcttttgtggatcgtgacaatctgcaccagatgtttatcactttcgagacgcatttgttggctggaggcattactgtctggctcgaggatatgttggcttaaccagcgtaccagcgcatgttcactttccagctgcgttccggcttcttgtagcagttcgctgatatgcaagatatcggtaagacgccgctcaccgcctgccgttgccagcaagttttcagcaatgttacgcgcgctcatcagcgcccgcagcatcggcataacgccacgtttgcgccagatttgccgataaccatcgaactcttcgactaccacatcccacgcatgttcgtcattgttcagcgtttcgatatccagcgcgttcagccccatcatactcgttgccagcgcactacgcagggtgttctcacgttcgggcgtcatcaccgcctgcaacaaccaaagcatttcctgcgcttccagagtttcaaaaacactgtcgcggttgctaaggtaaacggaagggatttccagcaacgttaaggcatcgcgcacctgggcggcctcctggcggctgcgcaccagcacactgatgtcgctagcacgcaccggacgcgcgtcgtcgccgttcatcagcaacgcttcgccccgctgtccggcttgtagccagtcgcggatttgcgcagcacatacctgcgccatggtactttgataatcgccaacgccgcagctttcgccttccatcagccacattttcatcgcaggctgtgtttcacctttaaatacaaaacgtaacgcctgatttttcccggcacttttcactggaataaacggtatttcgcgaaacatgaacgcgtcatcagtctggctgaaaagcttattcacgctgttcaccattcctggtgcggaacgccagttggtgtctaaagtgtagtgggcgtgaacttcgctacgcgccttcatataagtgaagatatccgcaccccggaatgcatatatggcctgcttcgggtcgccaattagcaacaatgcggtttccggctgatggtgccagatacggcgaaaaattcggtactgctgggggtcggtatcctgaaattcatcgatcattgccaccgggaatcgcgtacggatcgccgctgccaacacctcaccgctttcgctacgcagcgcggaatcgagccgacttaacatgtcatcaaaacccaattcgccacggcggcgtttttcacgcgctactgtttcgcggatctcagccaatgcgcgggtgatcaccagatcgcggatgctcaatggttctgcaagcagttgatcgatcgcctcaaacagtggatgtcgcggggtttcccccccggccttcgtgcgatcttctaagaaacgctgggagaatttttccaggctctccggcaactgataactgtttgtctcttcttctgcccaggcgctgatcttgtcgatccatttagcctgattgctacggttaaacttgcgtcgatcaataccagaagattcgatcagcgcatccagttcacccactgcgtcgcgccactgctgttttaccgtatcaatacgcgccacaatttgcgcgtgacgggaagccagcgtttcatcatcgggcggcggtgctttgataaccggcgcttcgccttgcagataacgattaatatcgcgcagcaacgcctgcggccctttccaggtttcaaagacgacctgggctatttcacgcggcagcgggtagcagtggcgacgccagaaatcggcgcaggcctggtagcgtagcagagactcatcttcaatcagctgctgctcaaacagcatgccggattcaaaggcattcaggttgagcatgcgctggcaaaagccgtgaatagtaaagactgccgcttcatccatctgccgttcggctaacaacaaccactgcgcggcttgcgctttatcgtcgatctcttccagcaggcgttcgtacagtggattgtcggtggtttcacgcagacaggcgatgcgcaactcgtggatattgctacggatacgaccgcgcaattctgccgtggcagcctcggtaaaggtgaccaccagcagttcttcaacggtcagcgggcggggaaaggcggcggaaccgcctagtccaagtaacaggcgcaaatagagcgccgcaatcgtaaaggttttgcctgtgccggcagaggcttcaatcaggcgctcaccctgtaagggcaagcgcaaaggatctagtgtctcggcgacatcactcattcttttcactcatcaggggcattgtttgctgcaacgcgctgacgttctcccacactttccagccttcagggtgtacatattcggctttcccgttctggctgccggaaatctggctcagaatagccatgccttgcggctcgaccaccgcctgatggaagaaatcagcaagtttttgcggcgtcagcagttttatctgggccacgattttatcacggctatcgaagcgcatattgccgcgatcgaaatctttacttaacttgcttgcttcttcgccgagcgtttgcggtgcctgcagcatctgggtaattaccgcctgctggatttgcgcaaactcatctggcttcatcgctcgcaattttgcctctgcggttgggaaaaacgccttgtaacgctcccacaagaaactaggctgtttatcattgctttgcaaaaggaagcccatgccccactgacgccccacgctcattggaaacgcaaacacggcatagcccaattgttcttcggtacgcaactgattgtagaaccacggctgtacgatctgccccaacagagagctataggcactgctggtgtattcatcgtagccagtcggtacaaataccgctgccagtgcggagtcggtgctgttaccggctttttcaaagatgacggattgttttttatcgaccactacatctttgtttcgacaccactcactaccatcagcgcccaactgtttttgcacatcgcgtgccagcgttgttgcctgggcctcggtcatgttgccgataaccataaactctggtcgagccccactttttaaggcgtcgcgataggccagcacctctttcaacgtaatggagggcaaaattttacgccgttcatctcggctgaagtacggcacttggctgagcatctgcgcgggcataatcgcctgctcaaacgctttacccttttctgcggaatccatcatctggttataccaggacttcgcctgctcaagctgatcttccgtagcggtatagctaaagtacccctcgagcaatgcctggaacagctgcggcagacgctgggtgtaaccattagcattaaccataaggccgttgttagcgttggtggaaaaacttatgccaccaacgctcgcctggttgcttaactgatcaagcgccagccctgcgagataatcattgagcgcaaacatcacctgattgcgggcgctgtccatggctttcggattacgcaaaatcaggctgacatcagctttgggctcgctggcaaaataacggcttggcgcatacaccacgcgcagattgctctcatcaacaatcagctctggatggtcgtatttcttctcactcttaatcaggctgaaatcatcaggaatataagggttaagctctggcaaagagagcgcaatgtcggcggcttttttctgccagtcggcgaaagtttgtgcgctgattttatcgacctgatacggcgcatcgacaaagtaagccgttttgttgtgcggctctttcgggctgatataccagatacgcgcattctgcggcgtcatcatcgccagacgttcctttactgctttagcatcgtaccgatcggcaatattgactgcatccagcgtatgctcaacaggaacgcgaatcatggtatctgccagccattcgacgtaatccatatcacgggtgatgctcggataacggaagtcgatatccagcacattcgccagttcatcgaagtattgtttatcaatgcctttttcacgtaacagattgagatagctaaaaattgccgccacaacctgatcgcgattagccaggcctttatcggttaaagacgcagagatcgctaatacgccgctgttgccgttgacgataggatcggagttggcgctaatgccctcaactaatccctgcttttgcagccagtcagaaagtgtacctgggctgcgattgccaatcagataggtaatcaattcatcggttttactacggaacttcgcactgttgttatcgatgcgaaactcaacgcgcaacactttacgcggcagcgcagggacgtaatgaatgataatgcccttttgcgcgtcggtgactaccggcacggtgatttccggttttttgctctctttgttcggcacgcgaccaaaggtgtccgccgccatttttgccaactccggcagcggtttattactgtaaataaccgccttcatcaaattggcggaatagtacttctcgtggaaatctttcagcgcctgctgcaccggattaccaggtttgtcgcttaaagtttcgaggttaccaccagaaaacttactaccggggtgtgccgggttaatggtttctgcgctgacctgtgccatgcgcatcccgtcacgcgtacgcgccatggttaattcagcgttcaccgcattacgctcacgttcggcatatttcttgtcgagcaaaggttcagcaatagcatcggccaggcggtctaccgcaccaggcaaggcgtcgttctcaacttccagatagaaagccgtgcgatacggcgcagtgctggcattgtgactaccgccgtgcattttgagatattcggccagactgtcagcctgcgggtactttttgctccccatcagactcatatgttcaaggtaatgtgccagcccctggtacgcctcgggatcttccaggctcccaacgggcaccaccagcgcgctgaggcttttaactgcctgcggatcagaaaccagcaagaccaccataccgttatccagacgtatagcctgatactggcggttatctttatcacttttacggatggtttcctgaatcggctgccatcccgtttctgcctgacttaagggtgcccaaagggcaactaacaacaataatgctttgaaccaggtgctgcggggcattcacggacctcataatcaacttaattttctgtccagattcaacacgttaacgcaaatcatctgccagaatttaatcttgtgctgcacgagtcagcctatgtttatataaccatcagtccgtgactggtgcgcatcataaagtaagcggatagattgcgcaatttttatacagcactcaactctgattaaagcgaaacagcggtaacaggaaacgttggctctgttcaacgatggcctccattgtctctggtgttaattgccgccagagcctttgataccagatatcatcaccttcgccacgcaccatcatgttgccttcgtaagcctgaaggaatttcgtacgggctttttgcaacgtggaatcgtcatccagcatggcatcgttttgcgcgtcataacaggtttttagccacgcgccgccactttcaggtaacaccagcaatggcgcggacattccttcacgatacccctcaatcagttgactgaggtaatgcaaagcctgttcggctgcaagcggcggaaaacgccactcgccgtctttgcgtagaaaaaggcgactttcaccattaccaccgctggcacagtagacaaggtgttccagccaaagttgcattccctgggccacacttaataaagagggacgccagcgcaacaggccatccggctgcacctgcggcaaccagccagttatctgcacaccgttgcaggcgagatcaatttccatactctgccccggctggcgacaggcaatgactctgtcggcaagctgctgcatctcctggcactgtgtttcccagaaaatttcaccaaaagcgccatacggtaaatcccctgccgctcggaagcggcggaacaagcgttcggcatcatcctgctcaaccagtgcattcaataactgctgattgatttgataacggctaagtccttccagaataaatggctcggtgtcggggatttcgctgtcttcagtacggaagttcacctgcaaacgcatctggaaaaatgcccgcaccggatgtgcccagaatcgttgtagcgtttccagcggcacggtttccggtaaggtaaacggcagcggctgaacaaattcagaatgtgctttaccagcctggctggccgcaggtagccattcacgagcatagctttgtcgttcgcctggctggtagttttgtggatcaaacggcatccgggtatggaggcaagtaagatgcgcttttacccttgcctcgctttcatcacagttgagcgcttcatcgcccggtagataatgactttgcccgatgtagtcgatcagttcctgcaccagtacgctcgggaaacgctcactgttatcctgaatggaacgaccgatatagctgatatagagtttttgctgcgcggaaattaacgcttccaggaacagatagcggtcgtcatcgcgacggctacggtcgccacgcttcggtttctggctcatcaggtcaaagcccaatggcgcaagctgacgtggataaacgccgtcgttcattcccagcaggcaaaccactttgaacggaatactacgcattggcatcagagtacaaatgttaaccggtccggcgagaaaacgctggctgatacgttcttgatccagacgctgtgccagttcatcacgcaatagactcagcggcaccgcgtcgccatactgcgcacctaaaccttcggcgataatcgcctgccattgttgttcgatcagcgtcatcgccgcttcggtttccgcatccggcaggaagaaggcgttgagcatatcgcgacaaaccggcaaccactcttccagcggacgctcctgtgccagcccgcgacgccagatgtttagctgcattagcagactagccagatgccccaccagttctgcaattaagccgctgctttcatcataaggtagaacgctttgccactcgccctgcgcgctctccatcgcgtagcccaacaacatacgcgtcaggccaaatcgccaggtgtgttgtccggtggcggggagttccagctcgcgaacgttgtcgtcatctatgccccaacgaatgccggattcgttgacccactggcgtaaataacgcagcccttcttcggtgatgtcaaaccgcgccgccagcaccggcacatccagcaacgccagcacatcctcactcacaaaacgactgtcaggcagacttaacaggctgataaacgcttccagtaccggatgactctgccgcgcacgacggtcggaaatggcgtaaggtaggtaacgatccgcaggtgcgctaccaaacacagcctgaataaacggactgtagctgtcgatatcagccaccatcacgatgatgtcgcgcggagtaagtgtcgggtcttcctccagcatcgccagcaggcgatcgtgtaaaacttcaacttcacgctgcgggctatggcaaacgtggaaggtgatactgctatccagtggatcaagcgggcgtttgttatcgctacgggaaaactcttcgatgttcacaccagcaacggcgcggttttccagttccagaatgtcagactgaatgttatgcagcaggttatctggcgtgacatcgacaaaggcgtccagctcctggctgctctccaggtcagaaaggagataaatgtagtcgcgcccaagcttaccccaactagccagcagcgggttgccgacatcctgttcaccatcgctgttaaagagctgcccggcattttcgctatcacgaaatagcggcaattcgcgatcttcaaaactgtgtcgacgctgacgggtcagcagtttcgccagataagcaggatctttaatatcgccccagtaataacggcaggggttggtaaacaggagatggatttcaatatgtttacccagcgcctgtagcgcctggagataaacaggcggtaacgcggaaataccgcatataaagacgcggctaggtaaccccggcgggcaggtcgtcgcggactccagcgtttcgataaagcgctgatagagattggcgcggtgccagcgcggttgcccgagttgatgggtatattccaccagcgccttccacaacggggcttgccaggcctgtgcttctcccagcccttcaaccaaatgtcctgtttcccactgtgccagccagtccggacgatagaccagatactggtcaaacaggtccgccgctttactggaaagctggaacagttttcgcttgtcgctatcgtcagtcagataatgccgcaacagggtaaagtcttcgcgctccagcaattgcggcagcagagtcatcagtttccagctcatgctctgtttgttaaaggcgctctctttggggatttccggtaacacccggacgaacatatcccagataaagctcgctggcagcggaaaatcaatgtttgccgcaataccaaacttttggctcagggtcatttgcagccactgtgccataccggtactttgcaccagaatcatctctggttcgaaaggatcgtccagccgttcgcgttcgacaataaactccatcaacgcttccagcacgtccagacgattggaatggtagacccttaacatagcggctcctgattactgacgattcgggcaatgcaggcgggtcatctcgccttctctgcccccgggactaactagcgtaacgctgatgctgacacatcccgcctggcttgtctgcattcggttgacctgccagttggcaggtgggctaatcgcgcgcagttgcgtttgctgccagccatgccgccagagctgttggtactggtttctgctggcaagactgttcattaatgttcgctggaaaccgcttaacgcagtgacaatcatcaccatcaacaccatcgccaacattacctccggcaggctaaagccttgttgattcttcagggaagcactcataacgccctctctttcagcggttaaatcagggaagctgacataacgccctctctttcagcggacaaaaatcgctccagccgcgtgggctaaaaacaatgtttccatcaatgacttcgcctgttcgccacaagctaacgccttcataaccggcaatcaataaggcttcattatctgccagtaaacgcaaacaaacctgggcatcggtttcagcgtactggctgcactgaactgctggctgcgtctgccagcagtgcatttttccccacgccagcgcgctctgaacgatggcctggcggcgcaaactctgactttccatgctcacgcgagaggcaaaactgcgatcctgttggctcattccttgtaatagcaaactacccaaaaccagcagcatcaggaccagagccagactgctaacacccttttcgcggttcacaggttgaatcctgtcacgctatagctggcattcaccacggtttgcggttcagacttactggcagcacgcatattaaccgtcaacaccgggctgaagccgctgacatcctgacgtacgacctgaaaagtgtcgataatgatggcatccggattagtgactttatcccagcccttaccttcacaggatgtcgcaccgcgtagcgtttccagcacatgctccttcagacgaaatccaatctggtcggactcttttaccggttcgcgatcccagataccgttactgttcgcatcccactgcacaatgacacagtcaccctgtccgacaatttccagcccttcgccggtacagatgccatgacaataacccgccctctggagatgcttcgcgacggtaaatacccgcagccagatttcatcttccagcgccagcttacgggtgctcgttaaactttcacgctgtaacgcaggcagaaagcgtgccgcccccagcaacaatacgctactgatcgccatagcaatcaacacttccagcagagaaaaaccttgctcttttacaggcatccttctgtttctccttgctgacaaagccggagtcttccccacgggctaaccaccagccaccactcgcccgtactgtttttgaagcgaatatgcccggcccatgcggtattgcgcaggccaaagaaagcaaggctaggtgtcaggtcgctcatttcgacttcgggccagcgtggcacaaagaccaatggactactgccatgacaggtattggccccagcagcggaactcacaaggcaccataacgtcccctccctgataacgctgatactgtggtcgcggttatgccagttggcatcttcacgtaaatagagcaaatagtcccgcgcctggctggcggtttgccatagccgttggctctgctgccagtattgccagccatagagtccacttgcgcttagcatgaccaaaatcagcatcgcgaccagcgtttcaatcagcgtataaccacgttgtgttttcatgccggcagtatggagcgaggagaaaaaaagacgagggccagtttctatttcttcggcgcatcttccggactatttacgccgttgcaggacgttgcaaaatttcgggaaggcgtctcgaagaatttaacggagggtaaaaaaaccgacgcacactggcgtcggctctggcaggatgtttcgtaattagatagccaccggcgctttaatgcccggatgcggatcgtagccttcaatctcaaagtcttcgaaacggtagtcgaagatggattcgggtttacgtttgataatcaacttcggcagcggacgcggttcgcggcttaattgcagatgagtttgatccatatggttgctgtacagatgcgtgtcgccaccggtccagacaaaatcacccacttccagatcgcactgctgcgccatcatatgcaccaataacgcgtagctggcaatgttgaacggcaggccgaggaagacgtcacaggagcgctgataaagctggcaagagagtttgccgtctgccacatagaactggaagaatgcatggcacggtgccagcgccattttatccagttcgcctacgttccacgcactaacaataatgcggcggctatccgggtcgtttttcagctggttcagtaccgtagtgatctggtcaatatgacgaccatctggcgttggccaggcgcgccactgtttaccatacactggcccgaggtcgccgttttcatcggcccattcgtcccagatggtgacattgttttcgtgtagataagcaatgttagtgtcgccctgcagaaaccacagcagttcatggatgatggaacgcaggtggcaacgtttagttgtcaccagcgggaatccatcttgcaggttaaaacgcatctgatgaccaaaaatggaaagcgttccggttccggtacggtcgtttttctgtgtgccttcgtcgagcactttttgcatcagttctaaatactgtttcatggttcctcaggaaacgtgttgctgtgggctgcgacgatatgcccagaccatcatgatcacacccgcgacaatcatcgggatggaaagaatttgccccatgctgatgtactgcacccaggcaccggtaaactgcgcgtcgggctggcggaaaaactcaacaatgatgcgaaacgcgccgtaaccaatcaggaacaaaccactgacagctcccattgggcgtggtttacgaatatacaggttgaggataataaacagcaccacaccttccagcagcagctcgtaaagctgacttgggtggcgcggcagcacaccgtaagtgtcgaaaatggattgccactgcgggttggtttgcagcagcaaaatatcttctgtacgggagccagggaacagcatggcaaacgggaagttcgggtcaacgcggccccacaattcaccgttaataaagttgcccagacgcccggcaccaagaccaaacggaatgagtggtgcgataaaatcagagacctggaagaaggaacgtttagtacggcgggcgaagataatcatcaccacgataacgccaatcaggccgccgtggaaagacatgccgccgtcccagacacggaacagatacagcggatcggccataaactgcgggaaattgtagaacagaacataaccaatacgtcccccgaggaagacgccgaggaagcccgcatagagtaagttttcaacttcatttttggtccagccgctgcccggacgattcgcccgtcgtgttgccagccacattgcaaaaatgaaacccaccagatacatcaggccgtaccagtgaagcgccacgggtcctatactgaaaatgaccggatcaaactccggaaaatgcagatagctactggtcatctgtcaccacaagttcttgttatttcgctgaaagagaacagcgattgaaatgcgcgccgcaggtttcaggcgctccaaaggtgcgaataatagcacaaggggacctggctggttgccggataccgttaaaagatatgtatatgatccgcgttataaccctccgcgaatcagcccgcccatgccgcgacgctccataaaggctgcaacctgatggcgaacttcggtcgccagttgcgcttccagactacgctgcgcaagattttctgcttcggcataatcaatgcgccgcagcaggtattttgcccgcgctacagaacgtccgttcatagacagatggcgatacccaagcccaatgaggattgccacgcacatgggatcgcccgccatttcaccgcacaaacggagatcgattccatgtatttccgcttcccgggcgatcatcgccagagctcgtaacattgcaggatgaagactgtcataaatgttcgccacccgggtattgttgcgatcaacggccagaatgtattgagtcagatcgttggtgccaacagagatgaaatcgacccgctttgccagatgcggcagcataaataccatactcggcacttccagcatgatgccgatacgtggtttgggaatttcgtaaccgatcatctcctcgacttcacgtccggcacgttcaatcaggcggcgtgcttcatcaacttcatcgaggcttgtgaccatcggcaacagaatattcaggttgcccgtagcggcattagcacgcagcatcgcccgcacctggatcaagaagatctccggctgatcgagcgtaatgcgaatcccacgccaacccaggcatggattctcttcgctgatcggcatgtaaggcagctgcttatctgctccgacatccagcgtacgcaaggtgacgggtttatcattgaacatttgcagcatcccctgatactgcgccacctgttcttcttcgctcgggaaaccactttgcagcatgaatgggatttcagtgcgataaagaccgatgccatcaatacggctgcccagtttttcttcatgttccgggcttaaaccagcattgagcatgacttttatacgctcaccgctttttaactgcgcgggtaaattgacgtcatcttccgccagacggctaagctcaatctcttcactaattagccgctgatattcttgcagcagtaccggctccggatcgaccagcaattcaccgcgatagccatcaacgatcagcgtcctacgatgcagcacgctaggctgaatatccgcgcccatcacggtagggatccccagcgcacgtaccatgatcgcagcatgggagttggctgcgccatctcgcacgacaacaccgactaagcgatcctggggcagctcagcaagcgttgtcgcactcagttcatctgccaccagaatgaaacgttccggccaggcgttcggcccttgattagcgtcatcaagatgaaacagcaatcgctgacccagcgcacgtaaatcgccagcccgctctttgagatagttatcacttagcgcggcaaactgttcggcaaatttttcaatgaccgtttttaccgcccactctgccacgctgcctttatcaacctcggcaaacaattcgcgacgcagccgggtgtcgctaagcaggtggctgtaaagatcgaaaatagccgccgtttctttttgtgcaccggcggcaaagcgtttgctgtagcggcgaaactcgtttgccgcttcttccagcgccccggtcagtcgttcgcgttccagagccggatccagcgtacttgcctgatacacctgttccattaaaggtaacgtggcatcctgccagccttcggcaatcgccacaccaggtgctgccggtaatgcgcggattcgcgtctggcgatattgcccaaacaaggcagtcaactggctctgagaaagaatagctgccatctgggtggcaagcgtcaccaggaaggattcttcactttcgtcatactggcgcaactctcgttgctgtaccaccagtacaccaagcaactggcgacgttgaataattggtacgcctaaaaacgcgcggaaacgttcttcttttacggaggggatgtatttgaagctggggtgcttttgcgcatctgcaaggtttatcggttccgccagcctgccaaccaggccgacgatcccttcatcaaacgcgagcgttacagtgcgaccgcgtggttttttcagcccccgggtcgccatcaggtagtaacaacgtcgatcatgatcggccaggtagacgctacagacctcggtatccatcgcaagacagatgtcggtaaccagaatatttaacgcctcattcaggcgtggtgcgctggctaccttttcgactatttcgcgcaggcgagtgagcataattggcgtgacttaacctcttttacgtcgataagcagatgcgttttgtggttttggcgtattttcctgcagactcatcaccacactcgcgaactctttcattaccctacggtagacatcacgtttaaaactcaccacctgtctgaccggataccagtaacttacccatcgccagccgtcaaactctggtgtactgctggtttgcatattgatttctgcatcgccgctcaccagctgcaagagaaaccatttttgtttttggccgatacaaaccggcttcgtgtcccaacgcaccaaacgtttcggtaatttgtagcgcaaccagttacgcgtactagcaaggattcgaacgtctttgcggcttaatcctacttcttcaaacaattcacggtacatcgcctgctctgcggattctccggggttgattccgccttgcggaaattgccaggagtgctgaccaaatcgccgggcccacattacctgcccctggcgattacaaatcacgatacctacgtttgggcggtagccatcgtcatcaatcaccggactacctcaaaataaagctttatatacgaatgattgtttcatactccaggaagacggtaaaccactctctgcagggcattacacactaataacaattgaataactcacagttatgtgcagagttataaacagaggaaggggtggatagccgtttttattcaccttttctgtggatagagttgtgaagaactacggaattactacgggaaaacccggagcattctgaataagcccgatatagacattttaaaatattcattatcagtcaatgcattacatgtaattttagtaatgaaaaagagtaattcgtgacccaggtcacacctctcatttacgggttggcgaaagatcaaccaatgccgtatttatccacagaatgtgccactaagttaagcactgaaccactaaaaactggagtttcgtcgcacgtcaaggctgtaaatggaaacagtagtggaggtttttcacagttatcccagctttctgtggataacatggtgtaagatcctgtttattttcagtgaccagatttggaaaacccgttgcagtgttgcgcaactcgattaccggcaacctaaaaagcaatataaatcagagaattgaacaacgcatgtggaaaaagttacactgcgaatattcggcacataattgctgtttgttttttaatcaaggtatcatgacatgtcccaacctcgcccactgctctctcctcccgaaactgaagaacagttgttagcgcaagcacagcaactttctggttatacattgggagaactggcggcacttgtcgggctggttacgccagagaatttaaaacgcgataaaggctggattggcgtgttactggagatctggctaggtgccagcgcagggagtaaacctgagcaagattttgctgctctgggcgtggaacttaaaactatccctgtggatagtcttggtcgtccgctggaaacaacattcgtttgtgttgccccgttaacgggcaatagcggggtgacctgggaaaccagccacgtgcgccacaaactcaaacgcgtactgtggataccggttgaaggcgagcgcagcatcccgctggcgcagcgtcgcgttggaagtccgttgctgtggagcccgaatgaagaggaagaccggcagctacgcgaagactgggaagaattaatggatatgattgttctcggtcaggttgagcggattaccgctcgtcacggggagtatttacagatacgaccgaaagcagcgaatgcgaaagcgcttaccgaagccattggtgcccggggcgaacggattctgacgctgccacgcggcttttatttgaagaagaatttcaccagtgcactactggcccgtcattttctgatccagtaaccatcgctttgacctgccgctttccgggcatataattaccgcttcatttttttggcagggctttttagatgttatttgcatggataaccgatcctaacgcctggcttgcgctcggtacgctgacgctgctggagatcgttcttgggatcgacaatattattttcctttctctggtggtggcaaagcttcccacagcacaacgtgctcatgcgcgccgtctggggttggcgggagccatggttatgcgtctggcgctgctggcaagtatcgcctgggttacgcgcctgacaaatccgctttttacaatattcagtcaggaaatttctgcccgtgatttgattctgcttctgggtggcttgttccttatctggaaagccagcaaggaaatccacgaatccattgaaggtgaagaagaagggctgaaaacacgcgttagtagtttcctcggcgctatcgtgcagattatgctgctggatattatctttagcctcgacagcgtgattacggctgtgggtctgagtgatcacctgtttattatgatggcagccgtggtgattgccgtaggcgtgatgatgttcgccgcgcgcagcattggtgattttgtcgaacgccatcctagcgtaaaaatgctggcgctctctttcctgattctggtgggctttaccctgattctggaaagtttcgacatccacgtaccgaaaggttacatctacttcgcgatgttcttctctattgcggttgaaagcctcaacttgattcgcaacaaaaagaatccgctctgatactccgtacgctctcctgcgggagggcgtactcactccttttaccctcacagtttaagattttcctgctttcaagatatataacgtcggtttataaacagactattatcataggtaggccaaatgaggataaccggatgaaaaaatgggcagtaataatttctgcagtcggactggcgtttgctgtttccgggtgttccagtgattacgtcatggcgaccaaagatggccgtatgattttgaccgatggaaaacctgaaattgatgatgataccgggctggtgagttatcacgatcagcaaggtaacgcgatgcaaattaaccgtgatgatgttagccaaattattgaacgttaacaaataaggtcagcatccggctggccttaagatttttctctttcccttttcccttccctctgccatttttatattccttatgtcgtgattataaaaaggaaacggctatgcaatatcaccgtataccccacagtagcctggaagtcagcacgctggggcttggcacgatgacgtttggtgaacagaacagcgaagccgacgcccacgcacaactcgactatgccgtcgctcagggcattaaccttatcgacgttgccgaaatgtacccagtacctccgcgccccgaaacgcaagggttaaccgaaacctacgtcggcaactggctggcgaaacatggcagccgcgaaaagttaattatcgcctccaaagtgagcggaccgagccgcaataatgacaagggcatccgcccggatcaggcgctggatcggaagaatatccgcgaagcgctgcatgacagcctcaagcgcctacagactgattacctcgatctttatcaggtgcactggccgcagcgcccgaccaactgcttcggcaaactcggttatagctggacggattctgcgcctgcggttagcctgctggatacgctggacgcactggcagagtaccaacgcgcgggaaaaattcgttatatcggcgtgagcaacgaaactgcatttggcgtaatgcgctacctgcatctggcggacaaacacgatctgccgcgtattgtcaccattcagaacccttacagtctgttaaaccgcagttttgaagtaggtctggcagaagtcagccagtatgaaggggtcgaactgctggcctatagctgcctgggtttcggcacgctgaccgggaaatatctcaatggtgcaaaacccgctggcgcacgtaatacgctctttagtcggttcacccgctatagcggtgagcaaacgcaaaaagccgtcgcggcgtatgttgatatcgccagacgtcatggcctggaccctgctcagatggcgctcgcgtttgtacgccgtcaaccgtttgttgccagcactctgctgggcgcaaccacgatggatcagctgaaaactaacatcgaaagtttgcatctggagttaagcgaagacgtattagctgaaattgaagcggtgcatcaggtttatacttatccggcaccataagattaacgccggttaaaaccggcgttaaatattaatgacggcgctgccagatccacagcgccgttattgccagcgcaaacagcgcaccgaagccaatgccaatgggcacgaccgggatgcctatcattaccgccaggctgtaaatgcccagcatcaacaacatggcgctgttttcgccaaggttttgtactgcaatcgcattccccgccccgacgctttttttaccccgctcctgtagcaacgcattgagcggaacgacaaaaaagccccccatcacgccaatcagcatcaacaaggcataggctggcagcagctcgtgttgcagggaaaaaatcagtaccaccacgccaatcaaaatcccggctggcatacagcgactcacggtttccagcgtaactaacttcgctgccgcacctgcgccaaccacgataccaatcgctaccatcgcgttgagataggtgggcgtagcgttatcggtaatgcccagcgccaccggtacccacagcaccaacaggaaacgcagcgtgacacccgctccccagaataaactggtgcccaccaggctaaaacgcgtttcaccattgcgccataggctggtgcaggcattcaggaaactgcgggtcatgttgatgagattccaggactgccccggacgcgccgccgccagtttgggaatgtagatattggcaacgaccgcaccaccgtaggccagtgcgcatgcggccagggcgacgaggacatgccagtcagccagcacaccaccggctacggaaccgagcaaaatcgccgctatggtagaagcttccattaaaccgttagctttcactaacttactacccgtggttaattcgccgagaataccgtatttcgccggactataggctgcagcaccaacacccaccagcgtatagccgagaaacggattgataccaaagcagatactggctgcgcccagcagcttcaggccgttggcaaacatcatcacccggcctttggcgaagctatccgccacctgcccgacaaacggcgcaaaaagaatgtaagcacctacaaacaccatttgcaggatgggctggctccactccggatagaactgcgctttcagtaacgccagagtggcaaacagtagggcattatcgccaaacgcagagagaaactgcgccacgataaccgctttcatccccttgctccacaagctagtgttagtgtgcacactctcactcatcgtgttgttccgcttcgtctacccagcttttcaacgtgacaaagtcaggtttgccgctgccaagtaatggcatctgtttcagatagcgaatatcgcgcggtacagcaagctccggcacgccgtgctcgcgggcatactgttgcaacttatcgcgcgtcagttcgttatctgtggtgaaaagcaccagtgcctcgcctttgctggcatcgctcttaatcgcagtggcatggactttatctgggctaacaccaagtgccagttgttccaccatttccaggctcaccatttcgcctgcaattttggcaaagcgttttgcgcggccctgaatctgcacaaagccctgctcgtcaaaacgcacaatatcgccagtgtcataccagccgcgctccatttcgccgcgaacattctcggcggtgggcacttccagtacacctggcttctccacccgcagatagccgttcattatgttcggccctttcagttgcaggcgtccgccctcttcgataccagggacgctcaacaggcgcgcatccattcctggtagaatacgccctaccgtaccgggtttcgccgccatcggtacgttgatagaaacgacaggcgcgcattcggtcacgccgtagccttcaaggatgcgcaggccaaatttatcctgccaaagctgtttggtactttcttgtaatttttctgcgcctgccaccacatagcgtagacgatagaagtcatacgggttggcgaaacgcgcgtagtgaccgaggaaagtgctggtgccgaacaacacggtgcaactgcggtcatacaccaactccggcacaatgcggtaatgcagcgggcttggataaaggaacacttctgcacctgtaagcagtggcgtaaacaggcctaccgtcagcccaaaggagtgaaacagcggtaacgcgctcataaagcgatcgttggtggtgaagtcggcaatcgttttaatctgctcgacattcgccagaatgcttttatggctatggacgacgcctttcggatggccttcagaaccggaggtaaaaaggatcagcgcctcttcttccggctgctgtttaacctgtgccagacgcggcatcagcaaatgagcgaagatccatactttgtcggcagtggtgacatctgcttttaaatcttccagatagacccagcgcacctgagtaagttgctccggcagatgccagagtttgcctttatcgagaaactggcgggaagtgaagatggttttgatttcagccgccgtaatagcactggtcagcccttttaccccggcagtgtagttcatcattgcgggcatgcggcgacgggcgatggccccaaaaatcactgccgcactgatgcctgcattgggcagcattaagccgatgcgttcgccttcaacactgtatttttcaaggatgcgtccaacaaacagcgttttcgtaagcaatttgcgataggagtctggggtaaagttgacgtcttcgacacatttcttcccggctccgaagcggtacattgcactcagtaaagattcgtacagcgtttcacgcgggcgcaccgccattcgcgcttccatcattatttgatgcagcatttcgccagcgattttgcgacggtcacgggcacgcggcgcatccggcatcgccacctgcgttggtggcaaaatatgcagagtaatttgcgggaacaagcgacgtttaaccagacctttcaggcggctgaagtgcgtaagttccgccccttcaatacgcacaggaataaccgttgcaccagacttcgccgcgacaaaacccgcgccatcgtagattttcatcaggctgcctgtcgtggtgatgcgtccttcagggaaaatcaccactggtcggccctgttccaccagacgtaccagatgtttaatagccataggttgcgtcgggtcgagaggaacaaagtcgataaaacttttcagccaacgcatataccactgttggcttatactggtgtaaacggcaaacactggacgcacaggtaaaaacagtccaagcaaaatgccatcaataaaagagacgtgattaggcgtaattagaacgcgctcgcccttcagtgcctgggtgtcacccgtaacgcgaacgcgatacaaaacacggcacaaatttcgaaaaaagctaaaaagcattccaactccctttgctctgattcagtaaaagcgaatggagggagattacacgagataaagaacgcgagcgacagtaaattaggtgcgaaaaaaaacctgcgcatccgcgcaggttggtgcaagagacagggtacgaagagcgtaccgaataatctcaccaatcaatacctctgggatcttgattgtggtctgcacgacgactcttcgccagcgagaaaacgcaaaggaatgaagggaaatgcaacgaggtgtgtaaattgtcggttactgttacagattgatgaccggcaaaaaaaacctgcgcatctgcgcaggctggtgtaattcatgtgctcaacccgaagttgacttcacctatcaatacctctgggatcaccactttagcaacctgaagccaaacgccaccagcggtcaatcgcaacagcgtttcgcaaagtgtaaccaaaggtttgcaatctctttttttgtcttacttatttgcgtttggctcacattcccacgatgaaaacacgccaccccttgaaccaacgggcgttttccgtaacactgaaagaatgtaagcgtttacccactaaggtattttcatggcgaccataaaggatgtagcccgactggcaggcgttagtgtcgccaccgtttcccgcgtcattaataatagtcccaaagccagcgaagcttcccggctggctgtgcatagtgcaatggagtctcttagctatcacccgaacgccaacgcccgtgcgctggcgcagcagaccactgaaacggtcggtctggtcgttggtgatgtttccgatccgtttttcggtgcaatggtgaaagcggtcgaacaggtggcttatcacaccggtaattttttattgattggcaacggttaccacaacgaacaaaaagagcgtcaggccattgagcaactgatccgccatcgctgtgctgcgttggtcgtccatgccaaaatgatcccggatgctgatttagccagtttaatgaaacaaatgcccggtatggtgctgatcaaccgtatcctgcctggctttgaaaaccgttgtattgctctggacgatcgttacggtgcctggctggcaacgcgtcatttaattcagcaaggtcatacccgcattggttatctgtgctctaaccactctatttctgacgccgaagatcgtctgcaagggtattacgatgcccttgctgaaagtggtattgcggccaatgaccggctggtgacatttggcgaaccagacgaaagcggcggcgaacaggcaatgaccgagcttttgggacgaggaagaaatttcactgcggtagcctgttataacgatagtatggcggcgggtgcgatgggcgttctcaatgataatggtattgatgtaccgggtgagattagcttaattggctttgatgatgtgctggtgagtcgctatgtgcgtccgcgcctgaccaccgtgcgttacccaatcgtgacgatggcgacccaggctgccgaactggctttggcgctggcggataatcgccctctcccggaaatcactaatgtctttagtccgacgctggtacgtcgtcatagtgtgagtactccgagcctggaggcaagtcatcatgcaaccagcgactaaccgcagttaaagcaattccagcgccagtaattcttcgatggtctggcgacggcgaatcaaccgcgcctgaccattatcaaacagaacttctggtaacagcggacggctattgtagttggaactcatacttgcgccatatgcccctgtatcatgcagtaccagataatcacctgccttcacttccggcaaggcgcgggtttcaacatttcccccttcctgctgggtaaagacatcgccgctttcacataacggtccggcgacgacggtttccaccgttggcgcgtgttccagagaacgaccatcagctgccagggcactgatatggtggtaactaccgtacattgccgggcgcatcagatcgttgaacccggcatcaaccagcacaaagtggcggctccccatttgtttgacgctccgcacctgagtaattaatacgccagactgcgctaccaggaagcgacccggttcaatttccagtttcacagggtggcccaaatggcgggcgatttgctcacgcgcggcattccacagaccataataatgttcggtatcaaccgcctcttcaccctgttgataaggaacagaaagcccaccgcccgcagaaatagcctgtaaatcctgaccgaattcgatgacctgacgcaccatagcaccacacacctgttccagatgggcataatcaacgccagaaccaatgtgcatgtgaatgccgaccagctgcagatgatgacgttgtatcacgtccagtgcggcgggcagatcggtgtaccagataccgtgcttgctgttttcgccaccggtattggttttttggctatgtccgtgaccaaaccccggattaacgcgcagccatacccgatgccctgggctaacctggcccagttggtcgagcatatcaacagaacccgcattcaccggaatttgcaattcactgacgcgttcaagcgtcgcctgatcgataacatctgccgtaaaaacaatatcatcggggtgcgtttgcggattgtaacccgccgccaacgcacgctctatttcgcctaagctgacggaatccactttcacgccctgctcacgcattaagcgcaaaatatgaatattggaacaggctttctgtgcaaagcgcaccacatcaaactgtttcagcgctgcaatctgccgacgaataatttgcgcatcgtagacccacaccgggcagccaaattcagcgggcaaacgcagcagattttcggcggtgagatcggtatcggtgctgaacagactatgtggcataacaaactccagataagtgcttttttatgattacgccacatcataaaaagaataaaaaatatcgatttatgtcgagtctatgcaaaaatgatatggattaccggattgcgagagagcgctaatggccgccgttaacttacgtcatattgaaatttttcatgcggtaatgaccgccggaagcctgactgaggcggcacacctgctacacaccagtcagccaaccgtcagccgcgaacttgcgcgctttgagaaggtgatcgggctgaaattgtttgagcgcgtacgtgggcgattacatcctaccgtgcaaggactgcgtctgtttgaagaagtgcaacgatcctggtacggactggatcgcattgtcagcgccgcagaaagtctgcgcgagtttcgccagggagaactgtctattgcctgcctgccggtctttagccaatcttttttaccgcagctcctgcaaccctttctggcacgttatcccgatgtcagcttaaatatcgtgccccaggaaagtccgctacttgaagagtggctcagcgcccagcgtcatgatttaggactcactgaaacgctccatacgcctgcgggaacagaacgtaccgaattactctctttagatgaagtgtgtgtgttacctccgggtcatccgctggcggtaaaaaaggtattaacgccggatgattttcagggtgagaactacatcagcctttcccgtactgacagctatcgccagttgctggatcagctatttactgaacatcaggttaaacgacgcatgatcgtagaaacccacagcgccgcgagtgtctgcgcaatggtacgggcgggggtaggtattagcgtggttaacccgctcaccgcactagattatgcggcaagcggtttagtggtgcggcggttcagtattgcggttccgttcaccgtcagcctgatccgccccctgcaccgcccgagtagtgcgctggttcaggcgtttagtgggcatttacaagcggggttaccgaaactggtcacttctcttgacgctattttgagcagtgctacgacagcataattagctcagcataaaagcgacagcatcctcggcatggatcgccgcggtatcaaacacaggcaaaacactgcgctcttctggcaccagtaaaccaatttctgtgcagccaaaaatgacgccctgtgcgccctgttctgcaaggcgagcaatcacttgcgcacaataagcgcgactcgcttcggtaaattgccccagacacagttcttcaaaaataatctgattaattttcgcccgttcatccgcttcaggaataagacaattgatggaaaattgttccgtcagccgcccgcgataaaaatcctgttccatggtgtaacgcgtacccagcagcgccacacgagtcattccggccccggtaattgcacgtccggtggcatccgcaatgtgtaagaaaggcagagtgcaacgactctcaatggcatccgccactttatgcatcgtattggtacatagcacaataccttctgcgcccgcccgctgtaagccaagcgccgcctcagccagaatgtccccggttttatcccattccccgcgacgctggcactcttctatttcatgaaaatcgacgctatgtagcagcacttgcgcagagtgaagcccaccaagccgctgtttaatgccttcatttatcaaacgatagtaaggaatggtggattcccagctcattcctcccagcaaaccaattgttttcattcctctctcctgatgtgtgttaccgcaacaaggctgaataaggaacgagacaaacgcctcaacggccaagtgcccaatctctattaacgaaaaaagggccggatgtacagcacatccggcccgtgaaatcagacgccgatatttctcaacttctcgcctgccatcagtttgcgttcgatatgttccagcgtgacatttttggtttccggaatgagccagaaagtaatgcccacaaacgcaatgttcagcgcagtgtagagccagaacgtaccggcagcgccaatgctatcaagcagtgtcaggaaggtcgcgccgataatcatattgctcacccagttcgtggtggtgctacaggtaataccgaaatcgcggcatttcagcggctgaatttcagagcacaggatccacaccactggcgcggcgctcatcgcataaccggcaatacacatcatcgtcatgccaacagagagccaggacaagccactggaagccgtaccgttatcaaactgcatcaggcaatagcccagcaccagagtgcctaacgccatcacgctgaaaccaattttcagagccggtttacgccctgctttatctaccgtaaacaccgcaataaaggtggcgaacataaaggtcagccctacgaccagagtcgcaatcatctgttgttctgtggtcgtaaagcccgccattttgaagatacgcggcgcgtagtacatgatgatgttcataccggtaaactgctgcatcgcctgcaacaacataccgagaaacacagcacgacggacgttacggttgatcttaaacagtgcccaaccgccctgttttaacttcaggctttcacgaatttcgttgagttcttctcgcgctttttcgctcgtatcgcgcagcatacgcaatacttcttccgcctcaatatgacgccccttttccgccagccagcgcgggctatttggcaggaagactaccagaataatcagcagaactgctggtaaagcaagaacccccaacattgcgcgccagttaccgctataactgaacgctgtatcggataaaaacgccagcacgatgccgagtgtgaccatcaactggtacatactgatcatcttaccgcgaacgttttcacttgccatttcagaaagatacagaggagcggtgtaagacgcgatcccgacagcaatgcccagcaccacacgagcggcgattaacatctctacgctggtcgcaaaagcggaccctatagaaccgagtacaaacaggatggcccccgccatcaggctgtatttacgccccaggcggaagctcagccaaccattaaacagcgcaccaattgctgcaccgagcatcatgctactaaccacccattcctgcaaacgactggtcagcacaaagtgatcggtaatgaacggcaacgctccggcgattacgccgatatcaagaccaaataacaatcctgcgaccgcagcagctacgctaacaaacatattcatacgccgcgtatcccgcaaagaacgtggcgttaaagcagattccgtattgatagtaaccattttttcctgccagcagagagtaagacatagtgaaaaaatacgtgaacaactcacgcaggtgtcaggtcggaaacagcataaatatggattaaattgctgcgacatgtcgttatgtgatggatattccaattttcaaattaagttgaattattgagattattattaaccacctaattttacagcagataaaattcataaagttcattaattgataattaatatggattatttcataaccatgatatggattatgatgatctacaggtataaaaaaccctgccatgcggcagggtcataaaagtaagaagaatgaattaacgcgccagccaaccgccatccacggcaatggtataaccattcacataatcactagcgctggaggcaaggaacactatcggccccatcaggtcactcggcagtccccaacgaccagctggaatgcggtcgagaatttccgcgctacgttgttcatctgcccgtagttgttgagtattgttggtcgccatgtaacccggggctatcgcattaacattaatgttgtgtttagcccattcgttcgccatcaatcgcgtcacacccatcacgccgcttttacttgcggtataagaaggcacacggatcccgccctggaaggagagcatactcgcgatattgataatcttgccgccattgccttgcgcgataaagtgtttcgccgctgcctgagacatgaagaatacgctcttgatattcaggttcatgacatcgtcccagtccttttcgctgaactcgagagcatcttcgcggcgaatcaatccggcgttattcaccaggatatcaatatgaccaaactccgctaccgcgcgatccagcagtgctggaataccatcaatctttcgcagatcggcggtcaggcttaaaaaacgacgccccagcgctgtgacctgctcgatggtttcagtcggttcaacgatgttaatgccaacaatgtcacagcccgcttgcgccagccccaacgccatcccctgacccagtccagtatcacaaccagtgacgaccgcaactttaccttcgagagaaaatgcacttaaaatcataacaataccttattcgtttatgcccacaattagcgcaaatctttaacggccacatggtccatatcatcaaagacctggttttcaccgaccatgccccagataaaggtataagctttggttccgacaccggaatggatgctccagctcggggagatcaccgcctgctcgttatgcatcacaatatgacgcgtttcttgcggctgccccatcatgtggaaaacgcaggcgtcatcatccatattgaaatagaaataaacttccatccggcgctcgtgggtgtgacacggcatggtgttccacaagttacccggagccagctccgtcagccccatactcaattggcaggtttccagtacatccgggacaaaatatttgttaatcgtgcgacggttactggtgaggttatcgcctaacgtgactggagatacttcgtccggtgtgacttttttggtgggatacgtcgtatgcgcgggtgcgcaattgtaataaaacttcgccggagtgccggtatcaatactggcaaagacaacttcttttgcacctttaccaacatacagggcgtcgcggtgaccgatttcatagcattggccatcgacagtaatcgtaccggcaccgccaatattgataacacctaactcgcgacgttcaaggaaatagcttacgccgagttgtttaccaacttccccgccaacggaaaccgttttagttatcggcataatgccgccaacaataattcggtcaatgtggctgtaaaccatggtgtactcatcggcgacaaataccttttcaaccaaaaattcattgcgcagcccttgggtatccagcgtttttgcgtgcgcactgtggatgctctgtcttacgtccacatcaacctccgataatcagtgaagcgtgaaaatagaaaacgatagtgaaacactgtttcgttttctctataaagggatgatatgcccatgggctagggttttcaattaaaaataaaacaatgtttcatttttaagttaaggattaaaaaaagtgcagtgtcgatcacgaatatgtcatgagaatggaaaaatgagggagcccagaaaatgtatgtcgacttgccagccatcattattcaacagattaatgacggcagatatttatcggtaaggaggaaatgcagagttattcgtcacgttcaatggtcaatgccacaccctggcccccgccgatacaaagcgttgccagtcctttgcgggcattacgtttcaccatttcatgaaccagagaaaccaggattcggcaaccggaagcgcctatcgggtgaccgagtgcgatcgcgccaccattgacattgacccgacgctcatcccactcaagcatcttgccaacgctaagcgcctgtgcagcaaacgcttcattagcctcgataagatcgacttcagccaactgccagcctacacgctccaggcaacggcgggtcgcatacaccggcgcaattcccatcaatgccggatctacaccaacgctggcaaatgcgcgaatgcgggccagcacgggtaaattcaacgctcgtgctttggcttcgctcatcatcattaccgcagctgcgccatcgtttatggaacttgcattacccgctgtcacagaaccgagactatcaaaactaggatttaaacgggctaagccttctgcgctggcgtcagtgcgtggctgttcatcggtatcaacaaccaacgtctgcccgttactttgggtcattaccgggacgatctcatctttaaatcgtccggcgtcaatcgccgctcgcgctttttgttggctgctaagtgcgtaagcatcctgcaactgacggctgatgccatattcgcgagccagattttcggcggtgacaccaatatgataatcattgaaggcatcccacaacccatcatgcacaagactgtcaaccaactggctattgccaagctgtgcaccggtgcggctatcagtcagaacatgtggtgcgcggctcatgttttcctggccaccggcgatgacaatatcagcctcgccacactgtatcgcctgagtagccagatgcagtgctttaagcccggaaccgcaaacgtcattaatagtgattgcagaaacgctattaggcagaccacctttaatagcgctttgccttgccggattctgccctgcccctgcagtcaacacctgaccaagaattacttcatccaccgcatatgcaggaacgccggtacgttctattaacgctttcacgaccagactaccaagttccacggcggaatgacccgctaacgcaccacgaaagcagccgataggtgtccgtaacgccccgacaatcacaacgtctttcatcacaacctcgcaccaattaacagtgcaatagtaaatgattgttaattacagttatcttaattgtttaaaaaaagtgatttttatcacaaaggaaatatgcctgagcagcagtcagagacataactggcacgtaaggtttgcaaccactaacccaccaatagaggggtagatagggcgttaatctcccatacttaacctggtttatggtaaattgccctccattttgtttaatttgtagatgatacgttcagataatgtctaatatttggtctaaagaagaaactctgtggagtttcgcgctctacggcacagccgttggtgcaggcacgctcttccttcctattcagttaggtagcgcaggggctgtggtcctgtttattactgctctggtcgcctggcctttaacatattggccacataaagccttgtgccagttcatcctcagtagtaaaacaagtgcaggtgaagggataacgggcgcggtaacacactactatggcaagaagattggtaatctgattaccacgctgtacttcatcgccttttttgtcgtcgtgttgatatatgcagtggcaattaccaacagtcttacggaacagctggcaaagcatatggttattgatcttcgcatccgtatgttggtgagtctgggtgttgtattaattctgaatctcatttttctgatgggacgtcatgccactattcgggtaatgggatttttggtattcccattgattgcctatttcttatttctttccatttaccttgtcggtagttggcaacctgatctattaacaacccaggtagagttcaatcagaatacccttcaccagatatggataagcattcccgtgatggttttcgcctttagccatacgcccattatttctacgtttgccatagacagacgtgaaaaatatggcgaacacgctatggataaatgcaaaaaaattatgaaagtcgcttatctcatcatctgcataagtgtactgttctttgtctttagctgcctgctttctattccacctagctatattgaagctgctaaagaagaaggggtcaccattttaagcgcgctttctatgctgccgaacgccccagcatggttgagtatttccgggattattgtcgcagtagttgcgatgagcaaaagtttcctgggtacgtactttggcgttattgaaggtgccacagaggtcgtcaaaacaacactacagcaggttggtgtaaagaaaagtcgtgcatttaaccgcgcactaagtattatgttggtaagcctgattaccttcattgtttgttgcattaacccgaacgcgattagcatgatttacgcgatcagcggcccgctcattgccatgatacttttcatcatgcctacgctgagtacgtatctcatcccggcgcttaaaccctggcgttccatcggaaatctgattacgctgatcgtgggtatcctgtgcgtaagcgtaatgttctttagctaatatcagttgtggatggttcaaaattgctacaattttgaaccattccatttttcataatattcatttgttattattccaccctatcacttctctcgtcatatcctagtattatcagttagttaaacacacaaagagatctgaacatcttaaataagactatttaagatgcataacttagattcgcaagatatcttctggtcattcaaaaacaatttgcgatatagatattcttataccatgagatagttatctggaccgctctcaaccatgcaagattaaatcagtgaaacataatcatatttgataacgagaaatgcatttttaaatgccttactcagaattatagcaaatacagattaatcgcaatttttcccggcaaaattacaaaatcatggtgtattgacatcatcaataaccaatgaaattatgcaattatatacggatagggaggttcttaacatggggctttgtagtcgttataaaagtcttacatgcaatagttgcagtatgcattgccaaataatgccagaagagagtccgcgtttgcagtattgcgcaaacagctgtttttgtatgtggcccgaagaaagtagttattttaatcgtggtgtggtagaaggtatcttaacaaaaaaccacaatgcgagattaagcggatatatttttgtcgattttagtgtaagttttttacgtctattccttgaaaaagactggattgactatcttgcaagtactgacatggggattgttttagtcagcgaccgcaatatgcaaagcttagctaattactggcgaaaacacaacagtgcaatatctgctgtcatatataatgatgatggtcttgatgttgccaatgaaaagatcagacaactatttattggtcgttatttaagttttaccggaggtaacacattaactcagatggaattcaccataatggggtatatggtttctggttataatccatatcagattgctgaagttctggatatggatatccgtagcatctacgcgtacaagcaacgaatcgaaaagagaatgggtggtaaaataaacgaattatttattcgtagtcatagcgtccaacattgatactcaacgaccagccagaatcatactctgtttatacgggcatttattgaaatgtccgtattttataaataggccgtcccctcaagagtaaacaccatagtatttaaaaccatcacacgaaaaattcagaagcattacgaaatatgaatttacaaacaatagtggcataaatgttaaccatgttaatttacgtaaagttttacgttgcaacattaaagcctcatttcaatcatcatgataaatataaaattaatatatatttatgccgtaaataccaatatacttagcaaactatgtgatctccatttcgattgatttagtgtttattgacgtatgtactggattattaacgataatatcgagttctggcctgagcaccgaaaattaataagcgtacataacgccgatcttaacgtcgttctgacaacgccagccagtcgatgtttaagtcttctacttgaagcttttcctgatgtggttgcacaacaagattttttcaccagagtctgggaagaagaaggtatgcgtgtgcctactaacacgttatatcagaacatatccattatcagacgcggatttcgcgctgttggtgatactacccacagcctaattgcaaccgtgccgagaagaggattcaagatccataatgacattaacatacaaaatcatgtaataaacagcagtacagacgcacatacacacaatgccccacctgccataaaagttaatgcgggatacaaagagagcattggtggcgcaaagaatttcaataacaaaatcctcaaacatataaaaagtcatctaattatgttgagcgcatttgtcataggcgcatattctgcatattggctatggaataataatcaaccgaagccatttttcaaggattacaagactgttgcggaaattaatggctgccattttaatgtaacagaagatacaattgatgggttgaaagagttcgataaatataaaacacggatactggatagcgggattaactgtaaaaaacatccgtggttatacttccctcttgcaaaatccagtccggggatgattgttatggcatgcaataaaaactataaccaacatgaagtggcaaactgtttaaccctgtcttaccgtgaggttaatcgtgattgattataaaaaaaacttattatttattttagtttttatcagtgggtttattctcttcactgtctattcttacactgcagaaaaaatgatatataacgaaacatgcactgcaaattgggtaatttttaatgaccagggacgagcaaatcttaccatcgactttatgtataacaaaaaaaataaaacaggaactgttgcgttgagtggaacctggcaacaaggtaacagagaaagtaaaagtatacggcgaaatattgaatacacatggattgaaaactatgacacagcccatttaacaagtaagaaagttaataagtttgagattatggatcaagttgatgatgatagacttgcacaacttattcctgatttttatgtctttccagaaaaaagtgtaagctataatatactaaagcaaggtaagcatgcttttattttgagcattggtaacagagcaataatgcattgtgcaaggtaaactaaaatagataacaaaaagatggaacctcgttaatcataaaacaataaaattaaatattctcgcagtatatggcagtctaaagcatcaaagatttgatcaacatctttcattttagacatctccttgcaatgtaaaatatcatgtatcaacaacatctggtgcaaatccaactgtcgaactcgacattcatcttagctcgattattattccttcgtacagtgcttgtaaacaatacagaaagaggattattaagaaccagtttactcagactatcaatagaggaaaggactaacgtttctttaaaagaattgatttcatcatctgttaaactaaactcatcattgacagatcgactgatataactgtttttaactttactctttacgttgactttattgacagaattaacattcacatatctactatttaatgtccaacttgttgtttgcgtgagaacattctcagcattaaggaatttttttaacggaatccttggtttctttttgctgtcgctatttacaatatcatgcatatagaccatttcatgaatctggctaaattcaatgtccattgtatacctcacatttttaccgtgactcgatgttactgttcaataatcaccttccatcaatactaaaattaatacccctaatgtgccgataacaaatatagtcattctacgtaacgtctccataaggtgatatttgacattatcagaagctgcgaattcggattttgctctaatcaaatgagagaaatgtaaaatgaagccacgaaatattaataatagcctaccactgcaaccattagttcctgatcaggagaacaaaaataagaaaaatgaagagaaatccgttaatccagttaaaatcacaatggggtctggtttaaattatattgaacaagaatctcttggaggaaaatatctaacacatgatttgagtataaagatagcggatatttctgaagagataattcagcaagcaatattatctgctatgagcatatataaatttagcataacagatgatttaatgagtatggctgtaaatgaactcataaaactgaccaaaatagagaataatgtagacctgaataaattcactactatatgcacagacgttctatccccccgcgtcaccagacataataaagaaaaaaacaaacgacattctacccttctcaaaaatcccctttttaattttcattgaaaaaatggcaattgatactatgaatccaggtcatacacattaaggcatttatgtaatgtcgtaattaagataactaataaggtgaatattagtaaaacaactaatgatgttattagtttgtagtgaacagtacttttaccaataatgaaaaatataccataagcaatgcaagcttaaaactcataatttaaaaaagataaatataaaaatatcaatgagtcaatcaataataatttggcatcacgagacacatcacagaggaatattatgagcacagaaacaattgaaatattcaataatagtgatgaatgggcaaatcaactaaaacacgcattaagcaaaggagaaaatctggcattactacatggtttaactcctgatatccttgatagaatatatgcatatgcattcgactaccatgaaaagggtaatataacggacgcagaaatttattataaattcttgtgcatttatgcgttcgaaaatcatgagtatctaaaagattttgcaagtgtatgtcagcccaaaaagaaatatcaacaagcatatgacctttacaaactaagttacaattacttcccgtatgatgactatagtgttatttatcgtatgggtcaatgtcagattggggctaaaaatatcgataacgcaatgcaatgtttctatcacattattaacaattgtgaggatgatagtgttaagagtaaagcgcaggcatatattgaactcttaaacgataatagtgaagataatggctaagcattacaatcatttggttaaatttgctggttatagtgcagttaaccactataaccagcacctcttatgttttcttaaatcagcatcttaaaacagttaagagcatactataaatcattatttttcaatgcgttagagaacaatctactttatcaaaattgaataaggctatttcagattacatcactgaattcctaagataaattagtgaacacaaccatagatatgtcaaatgtaatttcctgtagcgttaatgacacataaatatgaatagccataatttctattgcttaagcaggatgcaagaaaccaattttttcatagaggttaactaatggacttagaaaataaattcagttatcattttcttgagggattaacgctcacggaagatggaattcttactcaaggaaatgagcaagtttatattccacagaaagagttaggtgtattaatagtattacttgaatccgctggtcatgttgtactgaaagatatgatcatcgaaagtgtatggaaaaatattattgttagtgacgagtccctgacaagatgtatctattctttgcgctgcatttttgaaaaaattggctatgatcgttgcatagaaacaatctaccggaaaggttatcgtttcagcgggcaggttttcaaaactaaaattaatgaagataatactagtgactattccatagctatattccctttcactactagtttgaatacactggatccattaatacttaatcaggaattagtgcaaatcattagtaataaaaaaatcgatggtctctatacctatccgatggctgcgacaaatttttgtaatgatcacatatctcaaaatagtttcttgagcagattcaagccagattatttcgttacaggaagaataaaccagaataatgcagtgaacactttatacattgagttgatcgacgctaaaaaccttttcctcatcgccagtaatcatctccctgttgatgaactacataatacaagtcaatttattatagataatatccttcaaacggtacataaaccagaacgatctgtaagattagctaagcaggaccaaggatataagaatcattatttaagtgatgaaatgttagccggaaagaaagaactttacgacttcacccctgaaagcatttacagggccatgactatatttgatagattacaaaataaaagtgatatacagacgctaaaaacagaatgttattgccttctagcggaatgccatatgtctttggcacttcatggaaaaagtgaacttgaacttgctgctcaaaaagcattagagcttttagattatgtaagtgacataaccactgtcgatggaaaaattttagctattatgggactgataactggtctgtctggacaagcaaaagtatctcatatcttatttgaacaggctaagatacacagtactgatatagcctctctctactactatagggcactagtccactttcataatgaaaaaattgaagaggcaaggatttgtatagacaaaagtctacaactcgaacccagaagacgaaaagcagttgtgataaaagaatgtgtagatatgtatgtgcctaacccgctcaaaaacaacattaaactctactataaagaaactgagagtgaaagccatcgagttataattgacaacattttgaaattaaagcagctgacgagaatttgtatgcgataaatttttattgacgcaattttattatttagatgtatgcaacttgttatttaaacaacagagataaaaatatctaagatattcaccttattgcaagatatttaaaatgctctagagttaaaagtatgatgtaaagaccattggcctggacaattaaaaaagggagctttatgactaatccaatcggtatcaataatttatctcaaagtagtaatatagcgaatgcaacgggtgatgaagtcgtaagtttagataaacacatcaacaccagtgctactgatacagatcaaatacaagcatttatagttagtacatggatggcgccttttcaaaatgatatgtatagtgaagataatcctatcagtccttactataaaattgagtggtaaacgattgaccaaataaatcataacgagatacttttataatagtatctcgttcctttcattcaatcctcacacatgaaaaaatatgcgctcaccaaaagttaaattcttaaccatcttcacgttttgtatatttattacaaaaatgtctttcgccagcaactcttgctctaatgaagcaggaacaatgttcagaatcgaaccaaatttaattaaagctatcgctcttgttgaaagcaatctaaaaaaggatagcataggcaagaacagagataagaataacaatataaagagtttagattattggttaatgcagataaaccagatgcatattcccctgttaaaaaaacgtggaataataaaagatgaacgagatttgttagataacccttgtctgaacattaaaataggaaccgagattttatataaccattttagtcgttgtggagtaacgtggcaatgcctggggacttataatgcgggttttgcaatggataaccaaaaaaagagacagcaatatgccccaaaatatatattgtatataccaggcttaatgaactaaacaatcgtaaggcttcagcaaaatgagcctaaagcctcttttttttatatagtgcaaacacccatacgtaaagctgttttgatcaactcgataccactgtgaacatctaatttcttcatgatattgagtctatgagtttcgactgttttcctgcttaactgcaagaaattagcgatttctttgtttgttttaccatcagctatgagttgtaatatttcactctcacgatttgtaagttgattatcagaggaatacctggaagatattttttcacaatccatatgtacactatcaaaataagtgtaaccattactaatgctatcaatagcacgatttagtttcgccgggtgactggttttccatacgcatcctttcgcacctgcttcaagcaattttatactatcaatatacggcatctttgctacaaatgtaataatatgagcatctatcttatggcttttaacccattttacgagttcggcccccatcattccacctgcaaattctcctaaaataaatatttaggctgtagatttgttacactccgctatagctttcttcagatctttatagcccacttatttaacaacttgaaaataaggtgttttacctgggttgttacaaaaggattgcattgcgtaaacgctttttatttacaacaaaatggggaagtattacggcgaagataaattggagcgggcgaagggaatcgaaccctcgtatagagcttgggaagctctcgttctaccattgaactacgcccgcttcgagatgcgtaaggcattataaaccttacgctctccttagcaagtgccacgctgctgactgctgattaattcgccatcagcattttggcttgctgccctgaggcggcaagtaacgtagcggatcaattgccgttgcacggtaacgaatctggaaatgcaggcgaacagatgccgcatccgtgctccccatagtggcgattttttgcccagccttcacgctttgcccattatttaccagcatcgtgtcattatgggcgtaagccgtaatgtaatcttcactgtgtttaatcatgatgagattaccgtagccacgcagctggttgcccacatacaccacctttcctgcacccgcggcgtaaataggtgtaccccgtggagcactgatatcaatccctttattgccgccatctgctgtgctatacggcatgataactttccctgtcgttggccataaccaacaacgttgccctactggcggccaggaacttttcggtaccgcactactcggtgtaacgcttgcggttttggtcgtacttttggcggtacttttacgtgtaatactgctacttttcgccccacccagttttagtttctgaccaacttcaatggtgtaagggggggaaatgccgttcagtcgcgccagttcttttacgctggttcccgtggtgcggctaatacgatatagcgtatccccccgtttcacggtgtaaacggagccggaatacgttcctgtatcggaacttttgctaccgctacagcccgccaaaagcagtccaacgcttaacaacatcacgatacccagagattttttattcaggcgtcccgcactcaaaatctttcctcgcttaaaaaacaagacgccttatcatagcagccagcctcttgatacccaatctcttgcttctggaaaaacgtggtaatagagaaagaggttaatttcatttggcaaagggaagtatcatcagcaaaatattcgctgtagaggtatcgaacttcctgactttttaccctatttcccatcctgatgcgtaataatcccaatttatcacattgattttatcgccactcatattgatacgtatcactgcccctattcagagtcctgtttcgtatcatatctgtgtttttttaacgtcatcacacttcctacctcccctaacgcttatcgtcgtttctggcgtaaatcttgcctgcttagactaaatctttgccataagaaccaaatgttcaaatcgaggggatttctatggaagcgcgggaagcaaccgctacgggtgaatcatgcatgcgcgtcgatgccattgctaaggtcaccgggcgggcacgatatactgacgattatgttatggcgggcatgtgttatgcgaaatatgtacgtagccctatcgcacatggttatgccgtaagtattaatgatgaacaagccagaagtttgccgggcgtactggcgatttttacctgggaagatgtgcctgatattccattcgctacagctgggcatgcctggacacttgacgaaaacaagcgcgataccgccgatcgcgcactgctaactcgccatgttcgtcatcatggtgacgccgttgccatcgtcgtggcccgcgatgaactcacggcagaaaaagcggcgcaattggtcagcattgagtggcaagaattacccgttatcaccacgccagaagcggcgctggcagaagacgctgcaccaatccataacggtggcaatttactgaaacaaagcacgatgagcacgggtaatgtccaacaaacaatcgatgccgccgactaccaggtacaggggcactatcagacccccgttattcaacattgtcacatggaaagcgtaacaagcctggcgtggatggaggatgacagccgaattaccatcgtttccagcacccagatcccgcacattgttcgccgcgtggttggtcaggcgctggatattccctggagttgcgtacgagtcatcaaaccatttgtcggtggcggttttggtaataaacaggatgtactggaagagccaatggcggcattcctgaccagcaagcttggcggcattccggtgaaagtttcccttagccgtgaagagtgtttcctcgcaacccgtacccgccacgcttttaccattgacgggcaaatgggcgtgaaccgcgacggaacattgaaaggttatagtctggatgttctgtctaacaccggcgcttatgcatctcacgggcactccatcgcttctgcgggggggaataaagtcgcttacctttatcctcgttgtgcctacgcttacagtagtaagacctgctataccaacctccccagcgctggtgcgatgcgtggttatggcgcgccacaagtcgtatttgccgttgagtctatgcttgatgacgccgcgacagcgttaggtattgatcctgttgaaattcgtttacgcaacgccgcccgcgaaggagatgctaatccgctcacgggcaaacgtatttacagcgcagggttgccggagtgtcttgaaaaaggccggaaaatctttgaatgggaaaaacgccgtgcagaatgccagaaccagcaaggcaatttgcgccgcggcgttggcgtcgcctgttttagctacacctctaacacctggcctgtcggcgtagaaatagcaggcgcgcgccttctgatgaatcaggatggaaccatcaacgtgcaaagcggcgcgacggaaatcggtcagggtgccgacaccgtcttcagccaaatggtggcagaaaccgtgggggttccggtcagcgacgttcgcgttattagtactcaagataccgacgttacgccgttcgatcccggcgcatttgccagtcgccagagctatgttgccgcgcctgcgctgcgcagtgcggcactattattaaaagagaaaatcatcgctcacgccgcagtcatgctacatcagagtgcgatgaatctgaccctgataaaaggccatatcgtgctggttgaacgaccggaagagccgttaatgagcttaaaagatttggcgatggacgctttctaccaccctgaacgcggcgggcagctctctgctgaaagctccatcaaaaccaccactaacccaccggcgtttggctgtacctttgttgatctgacggtcgatattgcgctgtgcaaagtcaccatcaaccgcatcctcaacgttcatgatagtgggcatattcttaatccactgctggcagaaggtcaggtacacggcggaatgggaatgggcattggctgggcgctatttgaagagatgatcatcgatgctaaaagcggcgtggtccgtaaccccaatctgctggattacaaaatgccgaccatgccggatctgccacaactggaaagcgcgttcgtcgaaatcaatgagccgcaatccgcatacggacataagagtctgggtgagccaccaataattcctgttgccgctgctattcgtaacgcggtgaagatggctaccggtgttgcaatcaatacactgccgctgacgccaaaacggttatatgaagagttccatctggcaggattgatttgaggataacatcatgtttgattttgcttcttaccatcgcgcagcaacccttgccgatgccatcaacctgctggctgacaacccgcaggccaaactgctcgccggtggcactgacgtactgattcagctccaccatcacaatgaccgttatcgccatattgttgatattcataatctggcggagctgcggggaattacgctggcggaagatggcagcctacgtatcggctctgcaacgacatttacccagctaatagaagatcctataactcaacgtcatctcccggcgttatgtgctgcggccacgtccattgctggaccgcagatccgtaacgtcgctacctacggtggaaatatttgcaacggtgccaccagcgcagattctgccacgccaacgctaatttatgacgcgaaactggagatccactccccgcgcggtgttcgtttcgtcccgattaatggctttcacaccgggccgggcaaagtgtctcttgagcatgacgaaatcctcgtcgcctttcattttccgccacagccgaaagaacacgcgggcagcgcgcattttaaatatgccatgcgcgacgcaatggatattagtacgattggctgcgccgcacattgccgactggataacggcaatttcagcgaattacgcctggcatttggtgttgccgcgccaacgccgattcgctgccaacatgccgaacagactgcacaaaatgcgccattaaacctgcaaacgctggaagctatcagcgaatctgtcctgcaagatgtcgccccgcgttctagttggcgggccagtaaagagtttcgtctgcatctcatccagacgatgaccaaaaaagtgattagcgaagccgtcgccgcggcggggggaaaattgcaatgaatcacagcgaaacaattaccatcgaatgcaccattaacgggatgccttttcagcttcacgccgcaccaggcacgccgctcagcgaattactccgcgaacaaggactgctaagtgtcaaacaagggtgctgcgtgggtgaatgtggtgcctgtacggtgttggtcgacggcacagcaatagacagttgcttataccttgccgcctgggctgaaggaaaagagatccgcacgctggaaggtgaagcgaaaggcggaaaactttctcatgttcagcaggcttatgcgaaatccggcgcagtgcagtgcgggttttgtacgcctggcctgattatggctaccacggcaatgctggcgaaaccacgcgagaagccattaaccattacggaaattcgtcgcggactggcgggaaatctttgtcgctgcacggggtatcagatgattgtaaatacagttctggattgcgagaaaacgaagtaaaaggatatccggcctgaattcaggccggattcactgaggttatgtgtttaacaactcatatttcttaatcttgcgatagagcgtagcaatgccgatgcccagttcatcagcaacttgcttcttgctgttatgacgactaagcgcctcgcggatcatttgcttttccatctcctccagcgccgtgccgcccgcatcatcgagactcaggtgcgcctcactgacctctgttacatcactttgctccgttgtgccattattcagcagatttggcggcaatagcgtgctgtcgataacttcaccactaggaaccacgttaaccagatattccatcaaattgcttaactcgcgcaggtttccgggccaacgatgcttacgcaatatttcgacgacatcgggagcaatgccaggataaacgcttcccagacgacgggtatgcagatgtaaaaagtaatgcaccaatagttcaatatcttcctgacgttcacgcagcggtggcagagttatcgggataacattaagtcggtagaagagatcttcgcggaatttaccttcggcaatgaactgggccaaattctgattagttgcagaaatgatgcgaatgtcgacttgtattgggctactggcaccaatcggcagaatttcacgtgcctcaatagcgcgcagtaatttagcctgcaacattaatggcatatcacctatttcatcgagaaacagcgtgcccgtattcgccgcctgaatcaaccctgttttaccgttggcagaagcgccagtaaatgcacctttaacataaccgaacagttcgctctccagaagctgctccggaatcgcggcacagttgatagcaataaagggtttattccgtcttccgctcaacttatggattgcacgggcgacgacttctttacccgtgccgctttcaccaaccaccataacgctggatgggctgggtgcaatacggctaatgagtcgttttaattgccgcataacacggcactcgccaaccaattgttcaatatgcggttcatcaggtgcatttgctacagaaaaactggtatggctttggtgaaacgccattaaaaataattgtcggccctgaatgttatgcaattgaccaatgattaattcacttttatcgtcccaactaacaatatgctgcatatgtccatgggtaaaattactctcaaatgttaatggtctgaaacggataggtttcccaataatattattttgcacaacaccaagtgtttttaaggcagtctgattaacaaactgaacccgattttcatcatctacaactaatacgccctgatccatattatcgatcatggtcgcaaatattttactgatgttatctcctggcccctgatcctccagaagtttgctaacaaaaatggtggatatatggcgaacataatcagaaaattcgcgtaaattatcactgatatgctcttgttgctcgtgggtaacggcaatcaaacttatcaccccaacacaacgatcctgtaaaatgacaggcgtacccagaaatgctttttcgcggcaattttctttactatcgcaaccttcgcaaaggggatcgaagcgagactgtgtcacaactttttcagttttcgtttccaggacgtggcggagcaggcgactgttgccgctcaactggcgaccaagaaacttcccatacgcgcccgttccggcaacgcgacacaagttttcatcaacgatctcaacctcaagctgcaaaaacgctggcaagcattctggcaaaacgctgaattgtcggttgaatttgcatcaatacactctgcgtagtagcaagctccatagctttaccttccagacttacttaaaagtcgatcattgaagacgttgatggttcacagatcatgatgatattaactcaggcgaaattggctttgataaaaacataagatttttatcattttctaatgaaattatggaagagatatcacatttctatatcaatatgagaattacggcggtgagtttatcaaactgaagagagatagcctgcccctttatcttatttctgatacttagcagcaaataaataacgcgataaaaaaagccaaacgttttcgtattttacaaacaaccagaagctggcatcaatttgtgatcaaccccacacattatccgtcaaattagtcttttgcagccgcgcggataattctggcacacttattgttagtcccaggtatagctgtgaaaacaccaatcactttggcaagtcacagtgaaataaaccactttgcctgtcattccactaccgggactttatgatgaaaactgttaatgagctgattaaggatatcaatagcctgacctctcaccttcacgagaaagattttttgttaacgtgggaacagacgccagatgaactgaaacaagtactggacgttgccgcagcattaaaagcactgcgtgctgaaaacatcagtaccaaagtctttaatagtggattaggtatttccgtattccgcgacaactccacccgtacccgcttctcttatgcttccgcgcttaacctgctcggccttgcacaacaagatctcgacgaaggcaaaagtcaaatcgctcacggcgaaaccgtgcgtgaaaccgccaatatgatctccttctgcgccgacgctattggtattcgcgacgatatgtatctgggcgcaggcaacgcctatatgcgtgaagttggcgctgcacttgatgacggttacaagcagggtgtactgccacagcgtccggctttagtgaacctgcaatgcgatattgaccacccgactcagagtatggctgacctcgcgtggttacgtgaacactttggtagtctggaaaacctgaaaggtaaaaaaatcgccatgacctgggcctactctccaagctatggcaaaccgctctctgtaccacaaggcatcatcggtctgatgactcgcttcggtatggatgtcaccctggcccatccggaaggctacgacctgatcccggatgtggttgaagtggcgaaaaacaatgctaaagcctccggtggtagcttccgtcaggtcaccagcatggaagaagccttcaaagacgcagacatcgtttatccgaagagttgggcaccttacaaagtgatggaagagcgtactgaattgctgcgtgcgaacgatcacgaaggcttaaaagcactggaaaaacagtgtctggcacagaacgcgcaacacaaagactggcattgtactgaagagatgatggaactgacccgtgatggcgaagccctgtacatgcactgcctgccagctgatatcagcggcgtatcctgtaaagaaggtgaagtgactgaaggcgtattcgaaaaataccgtatcgctacctacaaagaagccagctggaagccttatatcatcgccgcgatgatcctgtcccgtaaatacgccaaaccaggtgcactgctcgagcaactgctgaaagaagcgcaagaacgcgtgaaataacccctcgggccgatcagctggtcggccctctatttccagaggccaaaaggataggatatgtccgttttcagtttgaagattgatatcgccgataacaaatttttcaacggcgaaacaagtccgctctttagccaaagccaggccaaactggcgcgccagttccaccagaaaatagctggttatcgcccaacaccgctttgtgcgctggacgatctcgcaaacctttttggtgtgaagaaaattctcgtcaaagacgaaagtaaacgattcggtctgaacgccttcaaaatgcttggcggtgcgtacgccatcgctcaattattgtgtgaaaaatatcatcttgatatcgaaacgctgagttttgagcacctgaaaaatgccatcggcgaaaaaatgactttcgcgaccaccaccgacggcaaccacgggcgcggtgtggcgtgggcagcacagcaactcggacagaatgcggtgatttacatgccgaaaggttctgctcaggaacgcgttgacgccattctgaacctcggtgccgagtgcatcgtcacggatatgaactatgacgataccgttcgcctgaccatgcaacacgcgcagcagcacggctgggaagtggtacaggacacggcatgggaaggttacaccaaaatcccaacctggatcatgcaaggctacgcaaccctggcagatgaagccgtcgagcaaatgcgtgaaatgggcgtaaccccgacgcacgttctgctgcaagccggtgtcggagcaatggccggtggtgtgctgggttatctggtcgacgtctatagcccgcaaaatctgcacagcattattgttgaacctgacaaagctgactgtatttatcgctccggcgtcaaaggcgacatcgtcaacgttggcggtgatatggccaccatcatggcaggcctggcctgtggcgaacctaacccgctgggctgggaaatcctacgtaactgcgccacccaattcatctcctgccaggacagcgttgccgcattaggtatgcgcgtgctgggtaatccgtacggcaacgacccgcgcatcatctccggtgaatccggcgctgtcggtttgggcgttctcgcagcggttcattatcacccgcaacgtcaaagcctgatggaaaaactggcgctgaacaaagatgccgtggtgctggttatcagcactgaaggcgacaccgacgtgaagcactaccgcgaagttgtctgggaaggcaaacacgctgtagcaccttaatcaccctattggaactgctccctgcaaaacggggagtaaaaaatctggagaaaaataatggctaagaatattccattcaaactgattcttgaaaaagcaaaagattaccaggcggatatgactcgcttcctgcgcgacatggttgctattcccagtgaaagctgcgacgagaaacgcgtagtacatcgtattaaagaagagatggaaaaagtcggcttcgataaagttgaaatcgacccgatgggcaacgttctcggttatatcggccacggcccgcgtctggtggcaatggacgctcatatcgataccgtcggcattggcaacatcaaaaactgggacttcgatccgtacgaaggcatggaaactgatgaactgattggtggtcgcggtacttccgaccaggaaggtggcatggcctctatggtttatgccggtaaaatcattaaagacctcggtctggaagatgaatataccctgctggttaccggtacggtgcaggaagaagactgcgacggtctgtgctggcagtacattattgaacaatccggcattcgcccggaatttgtggtcagtaccgaaccaaccgactgccaggtataccgtggtcagcgcggtcgtatggaaattcgtattgatgttcagggtgttagctgccacggttctgcaccagaacgcggtgataacgccattttcaaaatgggtccgattcttggcgaattacaagaactctcccaacgtctgggttatgacgaattcctcggcaaaggcaccctcaccgtttctgaaatcttcttcacatccccaagccgttgcgctgtagcagacagctgcgcagttagtatcgaccgtcgtctgacctggggcgaaacctgggaaggcgcgctggacgaaatccgcgccctgcctgcagtacagaaagctaacgcggttgtttctatgtacaactacgaccgtccgtcctggactggcctggtttacccaaccgaatgctacttcccgacctggaaagtggaagaagatcacttcaccgttaaagcactggtgaatgcctacgaagggctgtttggcaaagcgccggttgttgataagtggaccttcagtactaacggcgtatctatcatgggccgtcacggcattccggtgatcggctttggcccgggtaaagaacctgaagcgcatgcacctaacgaaaaaacctggaaatctcacctggtgacctgtgccgcgatgtacgctgcaatcccgttaagctggctggcaacagagtaattactcttcacttattcccctccggttcgccggagggtttttggagtttgctatgcgcgtattgatcaaaaacggcactgtcgttaacgcagatggacaagccaaacaggatttgctgattgaaagcgggattgttcgccagttgggcaacaatattagcccgcagctcccgtatgaagaaattgatgccactggctgttacgttttccctggcggcgtggatgtccatacgcatttcaatattgatgtcggcatcgcgcgcagttgtgatgatttttttaccggtacccgcgcagctgcgtgtggcggtacaacaaccattattgaccatatgggatttggcccaaacggctgtcggttacgccatcaactggaggtttatcgtggttatgccgcccataaagcggtcatcgattacagctttcacggtgtgatccagcacattaatcacgcaatcctcgacgaaatcccgatgatagtcgaggaaggactgagcagttttaaactctatttaacctatcaatacaaactcaacgatgacgaggttttgcaggcattacgccgcttgcatgaatccggcgcgctgaccaccgtgcacccggaaaatgatgcggctatcgccagcaagcgggcggaatttatcgccgcagggttaaccgcgccgcgctatcatgccttgagtcgccctctggaatgcgaagcggaagccatcgcccgcatgattaacctggcacaaattgccggtaacgccccgctctatatcgtgcacctgtctaacggcttaggtctggattatctgcgtcttgcccgtgcgaatcaccagccagtctgggttgaaacctgcccacaatatctcctgttggacgaacgcagttacgatacagaagatggcatgaagttcattcttagcccaccgctgcgtaacgtacgcgagcaggacaaactgtggtgtggcatcagcgatggtgcgattgacgtggtggcaaccgatcactgcaccttcagcatggctcaacgcctgcaaatttctaaaggcgatttcagtcgctgcccaaatggcttacccggtgtggaaaaccgcatgcagttactgttttccagtggcgtgatgacgggacgtataacaccggaacgctttgttgaattaaccagcgcaatgcccgccaggttgtttggcctgtggccgcaaaaaggattattagcgcccggttccgacggcgacgtggtgattatcgacccacgtcagagccaacaaattcagcatcgccatctccacgacaacgccgactacagcccatgggagggttttacctgtcagggcgcgattgtcagaaccttatcccgtggtgaaacgattttctgtgacggcacctttacaggcaaagccgggcgaggtcgtttcctgcgacgcaaaccgtttgtccctcccgtgctctaaccactgccagggatctatacacaatcaagaatgatgagtgaggaaaaatgagtaagaaaattgttctcgccctgggcgggaatgcgctgggcgatgacctggccgggcaaatgaaagcggtaaaaattacttctcaggcaattgttgatttaattgcccagggacatgaagttatcgtcactcatggtaacgggccgcaggtgggcatgattaaccaggcctttgaagctgccgcaaaaactgaagcgcacagcccaatgctgccgatgtctgtctgtgttgcattaagccagggttatattggttacgatctacaaaacgctttaagagaagaactgctttctcggggcattaataaacctgtagcaacgctggttactcaggtcgaagtcgacgctaacgatccggcattcctcaacccgaccaagccgatcggtagcttctttaccgagcaagaagcagagcaactgacaaaacagggttacactctgaaagaagatgctggtcgcggctatcgccgtgttgttgccagcccaaaaccggttgatatcattgaaaaagaaacggttaaagctctggtagatgcaggtcaggtggtgatcaccgttggcggtggtggtatccctgttattcgtgaaggtaaccatctgcgtggtgccagcgcggttatcgataaagactgggccagcgcccgtttagcagaaatgattgatgccgatatgctgatcattctgactgcggtagaaaaagtggccattaacttcggtaaagagaatgaacagtggctcgatcgcctgagtttaagtgatgctgaacgctttatcgaagaaggtcattttgcgaaaggttctatgctgcctaaagtggaagctgccgccagctttgctcgctctcgcgcaggtcgtgaagcactgattaccgtattgagcaaagcgaaagaagggattgaaggcaaaacaggaacggtgatttgtcagtaatttaaaggccgggtgggtaataccatccggccaaagattgtcaagtaagtgcgctttgttgatgccggatgcggcgcgagcgccttatccgtcctacaaaacatcgcaaattcaatagattgcaatgcacttgtaggcctgataagcgtagcgcatcaggcaatttggcgtttgtcatcagtctcaggccgggtgggtaataccatccggccattttcatttaagccacttccagcacttcttttgtcgctttcacgccctgatgcatcaacatcattaacgcctcaagtacgccgccgccaatcgcccgggctttatcagaaacgctggtgaaatcagcggtttcaccacgaggatcgatatcaccaattttaaaaccaccaaccactgccaggccgtcgttcaacaagccacgcaccatccccgtcaacggtgctttaatttcatgctcaccaatccaggcaatcacatcgccctctttcaccagatcgcctaatttcacgttggatcgcataatgcctgcagcaggagcacggatcacccgtcgggtggtatgccccataatattgccaggaacaccggtattctcctgcgcacaaccagagtaaatcacctgaccgagccagtgcccgcgatttgtttcaattaccgcatgacaatccttcccagcagtaaagcccggcccaagcgcgattgttactggtgccatatctgcccgcgttcccaaattctgtttcgccagaatagcgtccaccacgcaaagcggtttcagttcatcaagcaaactacaggcgggatctaccatcacaggaatgaatccgcgttcggtaagtttcatcgcttccgcagagctggttgccaggcgagcagtgacgccttcgaccgtcatttcgccatcgaacacggcctgggcaaacgccacggtacaacgaatcactgtcggtttttccacttccagcatgatcactttaaaacccgcatgatacagacgtagcgccacaccactggcgatatctcccgcaccgcgaatcaccaccagctggtgtccggaaggatgagaaggtttcatcatcagcccacccggcgcgttatttttcacctgtaatatttctgccagcacgctgatggcgatctcctgcggcgtttccgcacctatgttgtaaccaacgggcgcatgtaaacgggcaatatgttcttcagccacgcctttctcacgcaattgacgcaggaaaagctgaaccttgcgacgacttgccagcaaccccaaccatgcaatgggctgttcaatgagtttgtcgagggcttcacgatcctgattattcgtggcaatcaggacaaaattatcagggcgaatatccagtgcttccactgccgcaccaaagctctcagcatggagaagcgtggtacttggtgggaatagttcaggattgaggctttcgcgataaatatcagcaacggcaatatcaaatcctaatagcgccgcactctgggctatcgcccggttgacatgccccgcgccaatcaacaccagacgtggacgcataccatggacgctgataaatacactcattgcacctccacaatcactcccgacagcatccgcaccgttacgagccatacgtccatggaataatcgcggcttacgttcctgcaatgcctgaaggctctcttcaatcaccttccgctcaaccattccgccaccaattgtaccgacgatagaaccatcggcgcgcactaacatttgtgcagaatggcggggagtgctgcctcggctatcaacaatttgcgccatagcaaacggacaattttgctcttcgagttttgcagcctctgtgaaaatattcataccaacctcaatggatatcctttcagtaacccggaatacccgggccgttaattcacaaatctgcgcgcgattgcaggatgttcttgtatatcgcccagccagattgcctctacgtcgtgttgttgcagcggttgaaggagctcgctttgtgcaatcgcattctcacattgagaaaaacggttaatgaaccagactcgccgacaaccttgcggtacgtttttaaacgccccctgagggtggcgaaccagcgcaacgagatcgctcagttgcaaggttgcatcaggtgttaacccggtaatatcagcaaactggctccagcgatggacattttctgtgctcactttcgcgcccaaagtatgtcctcccatcacagcaatcacgcagcaactgcttttgggtatgcaaggttcgtgctcatcaggcgcttttaacggcattccacggctgccatctgcttcaatgagaattacgtcacactctggtcgttgcaccagtgcatcaatcgcttctggcgtaaatccctgcacttttccctggttcgctttccagctgtgaaaacaaaaactaatgggggatgtaagagacgcatgaggaagcatggcgggatcacgacagaaaaccacgggccagtgagacgttggcataaacatatgtgtcgtcgtcgtgattaacacacgcctgccgctagcctggagcagttctgccagccaaaaaagcaagctggttttccccccagcaccaacaacagaaatcacagtgggacgtttctgcgcacctaaatcaatgactaatgcgcttgggtcaactatacttttcacgagtctttatgacctctctgggataaattatccccaacttaatccatcaggaagtaacgcaattatcaggcgttattagcccctataaataatggaaccactatgagtgccatcgactgtataattaccgctgccggattaagtagtagaatggggcaatggaaaatgatgttaccctgggaacagggaacaattcttgatacaagtatcaaaaatgcgttgcagttttgtagccgaattattttagtcaccggctatcgtggtaatgaactgcacgaacgttatgcgaaccagagcaatatcactattattcacaacccagattatgcgcagggtttactaacatccgtcaaggccgcagtacccgcagtgcaaacagaacattgttttctcacccacggtgacatgccaaccctcaccatcgatatttttagaaaaatctggagcttacgaaatgatggcgcaatactgccactccataatggcatccccggccatccgattttagtgagtaaaccatgcctgatgcaggcaatccaacgacccaatgtcaccaatatgcgtcaggcactccttatgggagatcattattccgtcgaaatagaaaatgcagaaataattttagatattgatactccggacgactttattacagcgaaggaaaggtatactgaaatttaaaaaacgtagttaaacgattgcgttcaaatatttaatccttccggcactcattatcataatgataaggaatcactgattttgagaaaagagaaaaattgataaatgggctggcaataataattttcaggagtgattttaattctcatttagcacctgtgagttcattcacaaaaagcccttaagtttcgagccgcctcacatttttttatatttcccgccaaacctggcaagagtggtgcgattgttgctctatccccctaaaccaccggatttctcaacaccggtcactcaatgatatctgtataagctaaggagagggttatgggggatattatgcgtcccattccgtttgaggaacttttgacgcgcatatttgatgaataccaacaacaacgcagtatctttggtattcccgagcaacagttttacagtcctgtaaaaggtaaaactgttagcgtcttcggtgaaacctgtgccactcccgtcggccctgccgctggcccgcacacgcagctcgcgcaaaatattgtcacttcctggctgactggcggacgcttcatcgaactaaaaaccgtccaaattcttgaccgcctggagctggaaaagccctgtatcgatgccgaagacgagtgctttaacaccgaatggtctaccgagtttaccctgcttaaagcctgggatgaatacctcaaagcctggtttgccctgcaccttctcgaagcgatgttccagccttctgattccggtaaaagcttcatctttaatatgagcgtcggttacaacctcgaaggtattaagcaaccgccgatgcaacagttcatcgacaatatgatggacgcatctgaccatccgaaattcgctcaatatcgcgatacgctgaataaattactccaggatgacgcatttttagctcgccacggattgcaggaaaaacgcgaaagcttgcaagccttacccgctcgcatccccaccagtatggtgcatggcgtcaccctctccaccatgcacggctgtcctccgcatgaaatcgaagccatttgccgctacatgctggaagaaaaagggctcaacacctttgtgaaacttaacccgaccttactggggtacgcgcgtgttcgtgagatcctcgatgtctgcggtttcggttacataggcttaaaagaagagagttttgatcacgacctcaagctgacgcaagcactggaaatgctggaacgcctgatggcactggcaaaagaaaaaagtctcggctttggcgtaaaactgactaacactctcggcaccatcaacaataaaggcgcactgcctggtgaagagatgtatatgagtggccgtgcgctgttcccgctctccatcaatgttgcagcagttctctctcgcgcctttgacggcaaactgcccatttcttattccggtggtgccagtcagctgactatccgcgatatttttgatacaggtattcgccctattactatggcaaccgacctgctgaaacctggcggctatctgcgcttaagtgcctgcatgcgcgagctggaaggctccgacgcctggggacttgaccatgttgacgtcgaacgactgaacagactggcagcagatgcgttaaccatggaatacacccagaaacactggaagccagaagagcgtattgaagtggcagaagacctgccgctgaccgactgctacgttgccccctgtgttactgcctgcgctatcaagcaagatattccggaatacatccgtctgcttggcgaacaccgctatgccgacgcgctggaactcatctaccaacgcaacgctctgcccgccattaccggtcatatttgcgatcaccagtgccaatacaactgtacccgcctggattacgacagtgcgctgaatatccgcgaactgaaaaaagtcgcgctggaaaaaggttgggatgaatataagcaacgctggcacaaaccagccggttctggtagtcgccatccggttgccgtgattggtgcaggtccggcgggtctggcagcaggttacttccttgccagagcgggccatccggttacgctgtttgaacgcgaagccaatgcgggcggcgtggtgaaaaatatcattcctcagttccgtattcctgcagagttaattcagcacgatatcgattttgttgccgctcacggcgtgaaatttgagtatggctgcagtcccgatttaaccattgagcagttaaaaaatcagggcttccactatgttctgattgccaccggcactgataaaaatagcggtgtgaaactggcgggcgacaaccaaaatgtctggaaaagtctccccttcctgcgtgaatacaacaagggtacagcgctcaagctgggcaaacatgtggtcgttgtcggggcgggtaacaccgcaatggactgcgctcgtgcggcgttacgcgttccaggcgtagaaaaagcaacgatcgtttaccgtcgtagtctacaagagatgcccgcatggcgcgaagagtatgaagaagcgttgcacgacggcgtagagttccgtttcctgaataatccggaacgtttcgatgctgatggcaccttaaccttgcgcgttatgagccttggcgaaccggatgagaaaggtcgtcgtcgtccggttgaaaccaatgaaacagtaacactgcttgtagacagcctgatcaccgccattggtgaacagcaggatactgaagccctgaatgcgatgggcgtgccgctggacaaaaacggctggccagacgtcgaccataatggcgaaactcgtctgactgacgtctttatgatcggcgacgtacagcgcggaccatcctccattgtcgctgctgtcggaaccgcgcgtcgggcgaccgatgccatccttagtcgggaaaatatccgttcccaccagaacgataaatactggaacaacgtcaatccagcggaaatctatcaacgtaaaggcgatatctctatcacgctggtgaacagtgacgatcgtgacgcgtttgtcgcccaggaagccgctcgctgcctcgaatgtaactacgtttgcagcaagtgtgtggatgtctgcccgaaccgcgccaacgtctccattgcggtcccaggcttccagaaccgtttccagacgctgcacctcgacgcttactgtaacgaatgcggcaactgcgctcagttctgtccgtggaacggtaaaccgtacaaagacaaaatcaccgtcttcagcctggcgcaagactttgataacagcagcaacccaggcttccttgtggaagattgccgggtacgagtacgtctgaataaccaaagctgggtgttaaacatcgacagcaaaggtcagtttaacaacgtaccaccggagctgaacgatatgtgccgcatcatcagccatgtccaccagcatcatcattatctgctgggccgcgtggaggtgtaatcatgttgattctgaagaatgtcactgcggtacagctacacccggcaaaagtgcaggaaggcgttgatatcgccatcgaaaacgatgtgattgtcgctatcggcgatgccctgacgcaacgctaccccgacgccagcttcaaagagatgcatggccggattgtgatgccagggattgtctgcagccacaaccatttttacagcgggctttcccgcggaattatggcaaacatcgcccctttgcccggatttcatcagtacgctgaaaaatctctggtggcggctcgatcgcgcccttgatgaagagagcctctattacagcggactgatttgttccctggaagcgattaagagcggatgtacaagcgttatcgatcaccatgcctctccggcgtatatcggcgggagactctccacattgcgcgacgcatttttaaaagttggcctgcgcgcgatgacctgttttgaaactactgaccgtaacaacggcatcaaagagttgcaggaaggtgtagaagaaaacatccgtttcgcccgtttgattgatgaggcgaagaaagcgacaagcgagccgtatctggtggaagcacatatcggtgctcacgcgccgtttaccgtgccggatgccggtctggagatgctgcgtgaagccgtgaaagccacaggccgtggtttgcatattcacgctgcggaagacctttacgacgtttcctacagtcaccactggtacggcaaagacctgctggcacgactggcgcaattcgatctcatcgacagcaaaacgctggtcgctcatgggctgtacttgagcaaagatgacatcaccctactcaatcagcgcgatgcgttcctggtgcataacgcccgtagtaacatgaacaaccatgtcggctacaaccatcaccttagcgacatccgcaatctggcgttgggaacggacggcattggtagcgacatgtttgaagagatgaaatttgccttctttaaacatcgcgatgcgggtggtccgctgtggcctgacagttttgccaaagccctgactaacggtaacgaactgatgagccgcaactttggcgcgaaatttgggcttctggaagccggttacaaagctgatttaaccatttgcgattacaacagcccgacgccgctgctggcagacaatatcgccgggcatatcgctttcggtatgggcagtggcagcgttcacagcgtgatggtcaatggtgtgatggtctatgaagaccgtcagtttaacttcgattgcgattccatttatgcacaagccagaaaagccgctgccagtatgtggcgtcggatggatgcgctggcataaatgacagatgccctcttcccgcagggaagagggttaaataaggaaagaagatgattgaacaatttttcaggcccgactctgtcgaacaggcgctggaactgaagcgccgctaccaggatgaagccgtctggttcgccgggggcagcaaactcaatgctacaccaacccgtaccgataaaaagattgccatttccttacaggatctggaactggactgggttgactgggataacggtgcactgcggattggcgcaatgtctcgcttgcagccactgcgtgatgcgcgatttattcctgcagcgctgcgtgaagccctcggttttgtttacagtcgccatgttcgtaatcagagcaccattggtggtgaaatcgccgcccgccaggaagagagcgtgctgcttcccgtcctgttggcactggatgctgaactggtttttggcaacggcgaaacgctgagtatcgaggactacctggcctgcccatgcgatcgcctgctaaccgaaattatcattaaagatccgtatcgcacctgtgcgacccgcaaaattagccgttctcaggcaggtttaaccgtcgtgacggcagccgttgcaatgacagaccacgacggtatgcgaattgcgctggatggcgtcgccagtaaagcactgcgtctgcatgatgtcgaaaaacaaaatctggaaggcaatgcacttgaacaggctgtcgccaacgccattttcccgcaggaagatttgcggggcagcgtggcctataaacgctatatcacgggagttctggtagccgacctgtatgccgactgccaacaggctggggaggaagccgtatgatcatccactttactttaaatggcgcgcctcaggagctaaccgttaatccaggcgaaaacgtgcaaaagctgttgtttaacatgggaatgcactctgtacgcaacagtgatgatggtttcgggtttgccggttctgacgcaataatctttaacggtaatatcgttaacgcgtccttgcttattgccgcacagttagagaaggcagatattcgtaccgcagaatctctgggcaaatggaacgagttaagtctggttcaacaggcaatggttgatgttggcgtggtgcagtctggttataacgatccagctgcagctctgattatcaccgatcttctcgatcgcatcgccgcacctacccgcgaagagatcgacgacgcgctttctggtttgttcagccgcgatgctggctggcagcaatactatcaggtcattgaactggcggttgcacgtaaaaataatccgcaggccaccattgatatcgctccgactttccgtgacgacctagaagtcattggtaagcattatcctaaaactgatgccgcgaaaatggtgcaggcgaaaccctgctatgttgaagaccgcgtaacggctgacgcctgcgtcattaaaatgttacgtagcccacacgctcacgcactgattactcatctggatgtcagcaaagctgaagccttaccgggcgtcgttcacgttattactcacctgaattgcccggatatctactataccccgggtggtcagagcgcaccggaaccgagtccgcttgaccgccgtatgttcggcaagaaaatgcgtcacgtcggcgatcgtgttgctgcggtcgtcgcagaaagtgaagaaattgcgctcgaagcactgaagctcatcgacgttgaatatgaagtgcttaagccggtaatgagcatcgacgaagcaatggcggaagatgcgcctgtcgtgcacgatgaaccggtggtgtatgttgctggtgcgccagatactctggaagacgataacagccatgcagcccagcgcggcgagcatatgatcatcaacttcccgatcggttctcgccctcgcaaaaatatcgccgccagtattcatggtcatattggcgatatggacaaaggctttgccgatgccgatgtgatcattgagcgaacctataacagtacgcaagcgcagcagtgcccgactgaaacacatatctgctttactcgtatggacggcgatcgtctggttatccacgcctccacccaggtaccatggcacttacgccgccaggtcgcgcgcctcgtgggcatgaaacagcataaagttcatgtcattaaagagcgagttggcggcggttttggttccaaacaggacatcctgctggaagaagtgtgcgcctgggcaacctgcgtgaccgggcgtccggtactgttccgctacacccgtgaagaagagtttattgctaacacctctcgtcacgtcgcgaaagtcaccgtcaaactgggagcgaaaaaagatggtcgcctgacggcagtgaagatggatttccgcgccaacactggcccttacggcaaccacagtctcaccgtaccgtgtaacggaccggcgctgagcctgccgttatatccgtgcgataacgtcgatttccaggtcaccacctactacagcaacatttgcccaaatggtgcttatcagggttatggcgcaccgaaaggtaacttcgctatcaccatggcattagcggaactggctgaacagttacagatcgaccaactggaaattatcgaacgtaaccgggtacacgaagggcaagagctgaaaattctcggtgcaatcggtgaaggtaaagcgccgacctccgttccttccgccgccagctgtgcactggaagagatcctgcgtcagggtcgcgagatgatccaatggagcagtccgaaaccgcaaaatggtgactggcacatcggtcgcggcgtcgccattatcatgcagaaaagcggtatcccggatatcgatcaggctaactgcatgatcaaactggaaagcgacggcacctttatcgttcattctggcggtgcggatattggtactggtctggatactgtagtgacgaaactggcagcagaagtgctgcactgcccaccgcaggacgtgcatgttatctccggtgataccgatcatgcgttgtttgataaaggcgcatatgccagctccggtacttgcttcagcggtaacgcggcgcgtttggcagcggaaaatctacgggagaaaattctgttccacggcgcgcaaatgttgggtgagccagtggcagatgttcaactggcaacgccgggcgtcgtgcgcggcaagaaaggcgaagttagtttcggggatattgcccataaaggcgaaaccggcaccggctttggtagtctggtgggaactggcagttatatcacgcctgatttcgccttcccgtatggcgcaaacttcgctgaagttgccgtcaacacgcgtacgggtgaaatccgcctggataaattctacgccttgctggactgcggtacaccggtcaatccagagttagcgttgggacaaatctacggtgccaccctgcgtgctatcggccacagtatgagcgaagagatcatttatgacgccgaaggtcacccgttaacgcgtgatttacgcagttacggcgcaccgaaaattggtgacattccgcgtgatttccgcgctgtgctggtgccgagcgacgataaagtcggcccgttcggggcgaaaagcatcagcgaaatcggtgtaaatggcgcagctccggcgattgctaccgcaattcacgatgcatgcggcatctggttacgcgaatggcatttcacaccggagaaaatactcactgcgctggaaaaaatataaataataaatggccgcttcggcggcctgtttctctgtttgaacgatgactaaatagtgactgcgaaaatgagataagccgttctcaaggcgtcctgcgccccaaattcgtgggaatttattttactaattcagatgatcaaatttactttaaaaggagtgaagggatgtctgatataaaccatgcaggttctgaccttatatttgaactggaggatcgccctccctttcatcaggctctcgttggtgccattacccatctgttggcaattttcgttccgatggtaacccccgcgttaatcgtgggtgcggccttacagctttccgctgaaacaactgcctatcttgtttctatggcgatgatcgcctctggtattggtacctggttacaagtaaaccgctacggcatcgtcggttctggcctactcagtattcagagtgtcaattttagttttgttacggtcatgattgcgctgggcagcagcatgaaaagcgacggttttcacgaagagttaatcatgagcagccttctcggcgtctccttcgttggcgcatttctggttgtcggatctagttttatcttgccctatttacgtcgggttattacgcctaccgtcagcggtattgtggtactgatgatcggcttaagcctgattaaagtcggcattatcgattttggtggaggatttgcagccaaaagcagcggtacgttcggcaattacgaacatctcggcgttggtttattggttttaattgtggtgatcggctttaactgctgtcgcagtccgttgctacgcatgggagggatcgccattgggctatgtgtcggctatatcgcaagcttatgcctgggcatggtggatttcagcagtatgcgcaatttgccgttaatcaccatcccgcatccgttcaaatacggctttagttttagcttccatcagttcctggtggttggcacgatttatctgcttagcgtgctggaagcagtcggcgatatcaccgccacggcaatggtttcccgccgccccattcagggggaagagtatcagtcccggctgaaaggcggcgtgctggcagatggtctggtttctgttatcgcctccgctgtcggtagtttaccattaaccacgtttgcgcaaaataatggggttattcagatgactggcgtcgctagtcgttatgtcgggcgaaccatcgcggtaatgctggttatcctcggcttatttccgatgattggcggcttcttcacgaccattcccagcgcagttctgggaggcgcaatgacgttgatgttttccatgattgccatcgcagggattcgcatcatcatcaccaacggtttaaagcgccgtgaaacacttattgtcgccacttctttaggtttagggcttggcgtctcctacgatcccgaaatttttaaaatattgccagcctctatttatgtattagttgaaaaccctatttgtgctggcgggttaactgcgattttattaaatattatcctccctggtggctaccgacaggaaaacgttctgcctggtattaccagtgcggaagagatggattaacagtaaaggagtcaatgatgagtggagaacacacgttaaaagcggtacgaggcagttttattgatgtcacccgtacgatcgataacccggaagagattgcctctgcgctgcggtttattgaggatggtttattactcattaaacagggaaaagtggaatggtttggcgaatgggaaaacggaaagcatcaaattcctgacaccattcgcgtgcgcgactatcgcggcaaactgatagtaccgggctttgtcgatacacatatccattatccgcaaagtgaaatggtgggggcctatggtgagcaattgctggagtggttgaataaacacaccttccctactgaacgtcgttatgaggatttagagtacgcccgcgaaatgagcgcgttcttcatcaagcagcttttacgtaacggaaccaccacggcgctggtgtttggcactgttcatccgcaatctgttgatgcgctgtttgaagccgccagtcatatcaatatgcgtatgattgccggtaaggtgatgatggaccgcaacgcaccggattatctgctcgacactgccgaaagcagctatcaccaaagcaaagaactgatcgaacgctggcacaaaaatggtcgtctgctatatgcgattacgccacgcttcgccccgaccagttctcctgaacagatggcgatggcgcaacgcctgaaagaagaatatccggatacgtgggtacatacccatctctgtgaaaacaaagatgaaattgcctgggtgaaaagcctttatcctgaccatgatggttatctggatgtttaccatcagtacggcctgaccggtaaaaactgtgtctttgctcactgcgtccatctcgaagaaaaagagtgggatcgtctcagcgaaaccaaatccagcattgctttctgtccgacctccaacctttacctcggcagcggcttattcaacttgaaaaaagcatggcagaagaaagttaaagtgggcatgggaacggatatcggtgccggaaccactttcaacatgctgcaaacgctgaacgaagcctacaaagtattgcaattacaaggctatcgcctcagcgcatatgaagcgttttacctggccacgctcggcggagcgaaatctctgggccttgacgatttgattggcaactttttacctggcaaagaggctgatttcgtggtgatggaacccaccgccactccgctacagcagctgcgctatgacaactctgtttctttagtcgacaaattgttcgtgatgatgacgttgggcgatgaccgtagcatctaccgcacctacgttgatggtcgtctggtgtacgaacgcaactaataataaaactttaacatcctcgtgaggacatcattatgtctggagacatcctacaaacaccggacgcaccaaagccacagggcgcgctggataattattttaaaattaccgctcgtggcagtaccgttcgtcaggaagtactggctggcttaacgacctttctggccatggtttattccgttatcgtcgttccgggaatgctgggcaaagcaggttttcctcccgcagctgtgtttgttgccacctgtctggtcgcgggcttcggcagcttgctgatgggattatgggctaatttgccaatggcgattggttgcgcgatttccttgacggcgtttaccgcattcagtctggtactcgggcaacaaattagcgttcctgtcgcactgggcgcggtatttctgatgggcgtcatcttcaccgccatttccgtaaccggtgtgcgtacctggatcttacgtaatttgccgatgggtatcgctcacggtacaggtatcggtatcgggctgtttctgctgctgattgctgctaacggtgtgggtatggttatcaaaaacccgattgaaggcttgccagtggcgctcggtgcgtttacctccttcccggtgatgatgagcttgctggggctggcggtcatcttcggcctggagaagtgtcgcgtacccggcgggatcttgttggtgattattgcaattagcatcatcggcttaatctttgacccagcggtgaaataccacggtctggtggcgatgccaagcctgactggcgaagatggtaagtctctgattttcagcctcgatattatgggtgcactccagccaactgtacttccgagtgtactggcattggtgatgaccgcagtgttcgacgctactggcaccatccgtgccgtcgccggtcaggcgaatttgttggataaagacaaccagatcatcaacggcggcaaagccctgaccagtgacagtgtaagtagtatattctccggcctggtgggcgcagcgcccgcagcggtttatatcgaaagtgcggcaggaaccgccgccgggggtaaaacaggtttaaccgcaaccgtagtgggggcgttattcctgttaattctgtttttaagtccgctgagttttttgatccctggttacgccactgcacccgctctgatgtacgtaggtttgctgatgttaagtaacgtcagcaagctggatttcaatgattttattgacgctatggctggcctggtgtgtgccgtgttcatcgttctgacttgtaatatcgttaccggtattatgctgggctttgtgacactggtcgtaggccgcgtctttgcacgcgaatggcaaaagctgaatattggtacggtgatcattactgccgcactggtcgcattttacgcgggtggttgggcaatctaatagattctccgcgcctttcagcgcggagatttctttcagagaggattctcaccgctggcaacaatacgctgctggcggactcgcctgagttctctttcagtaagcaactgcagcgcctgtgttgggcaagattcaacgcaggctggcccctcttcccgctgttcacagagatcgcatttcacaatttgttgtcgggtatcccccggcaagctctgaatggtgatcattccaaacgggcacgcactgacgcaactctgacagccaatacaacgggcagaattggtctgcaccacctgctcgcccatcgtcagcgcccccacggggcaagcgccaacacaaggggcgttttcacactgatggcacatcaccggcgcactgatgctgtccagtcgctgtaccttcagccggggtaaaaagacatcggcattcaactcctgttcactagggtgagcgaccacacaggctacttcacaagtacggcagccaatacagtcagccggattaacgataattaagcttttcatcagcttgccttcgtatcaaacagagttaacatatcgcgcgccgcctgccttcctgcggccattgcagtgacaaccagatccgcgccatgaactgcatcaccaccagcaaagacttttttcagatgcgtctgggtaggtaaatacccgacgtcaccggtttgaatcaggccccatttatcgagtttaattccgctgccctgcaaccacggcatggcatgcgcctggaaaccaaaggccataatcagaacatcggcgggcaattcaaactcactacccgctaccggacgaggacgacggcgaccatccggccccggctcacccatggcggtacgaatcaggcccaccgcagttaaacgcccatcttcgtcacaagcgatatattgcggttgaacattgaactgaaactcgacaccttcctcgcgcgcattaaccacctctttgcggctgcccggcatactgacttcatcacgacgatacgcgcaggtcacgctggcggcattgaggcggatggaagtccgcaaacaatccattgtcgtatcgccaccgcccaataccacgactcgcttaccttccacgtccgtcagcggatactcttcagactccggcaatcccatgagctggcgggtatgggcagtcaggaacggtagagcctgaatgacaccgggcgcatcttcatgcggcagatctgctcgcatcatcccgtaagtccccacgccgatgaaaactgcatcatattcagaagttaaatcgctaaaggtaatatcgcggccaatttcacagttaagatgaaagtcgattcccattgcggtgaatatctctcgccgctggcttaataccgttttatcgagtttgaaaggaggaatgccaaaagtcagcataccgccaatttctggatggcgatcaaagacatcgacctgaactcctgcgcgcgccagaatatcagcacaccctaaccctgcaggcccagcgccaatcaccgccactttttcgctacggggaacaactttgctgacatcgggacgccagcccatcgccagcgcggtatcggtgatgtagcgttccagattaccgatagagactgcgccgctgtgatctttcaaagtacatgcgccttcacaaagacggtcctgtggacataccctgccgcaaatttctggtaaggaactggtctggtggcaaagttctgccgcttcaataatctttccttcctgtaccagacggatgtaatccggaatagcgttatgcagcgggcaatgccagttgcagttagctttttcggcacaataaacacagcggtcactctcataagtcgcttgttgtggatccagcccgcaatatatttcgccaaagtgggttttccgttcactcgcactaattttatctgcgcctttacggctgttaacggggagcaacgctgcactgcgagatggctgagcgtcactactcgcttttcctgctgccgttttgcgctggcgggccacctttatctgctgcaaccctttatcgtccatcagtcgtaacgcctgtgttgggcaaacttcaatacaggcttgcgtgccggaactgcgctggttacaaaggtcgcatttctgcgcaatcgtatcgaccatctcaacgacgccaaaggggcaagcgattgcgcatcttttacaaccaatacatttttgctcgtccagttgtacgctatcggactggaaagtcagagcattaaccggacaagccgtaacgcaaggggcattgttgcagtgatggcaggccaccggattcgcagcctggcctttccctacaacgtggatacgcggtcgaaagtcactgtgactcagcggccagttttcttgattgtgtgccaccgcacaggcaatttcacaagcatgacagcctatacattccgcagcttcagcagcaataaacttattcatttgcatccctttcatttaatgagttatgtcttctcaaatttcgcgatgcaataaacgggcatatattaggtagcatgaccgttttaattataattttgcgactgagttcaaattattgcccctcaatctatgccgctttcattatttcaacattgccgatcaaaagagcgctatccagataaaaacgattaaatgcgagagtgcgacatgccagaatgattaatgaaatatcaatatgagaaaattacagataattccattgtcaggttctcttctcattttcgtggtttaaccacgattatgtgattgcctccgcaattcctgtctctaactccccttcctcgcaaaaactggcactccacgagcatgtgtttagacagtttcattaacgtaaacggttgctttttactctggcgggcgaaaggagaaacactgatgagcgccatagattcccaacttcccagttcttctgggcaagaccgcccaactgatgaggttgaccgcatattaagtccaggaaagctgatcatactcggtctgcaacacgtccttgtcatgtacgcaggtgcagtcgctgttcctcttatgattggtgaccgactgggcctcagtaaagaagctattgcgatgctcattagcagcgatctcttttgctgcgggatcgtcacattattgcaatgtatcggtatcggccgctttatggggatccgcctgccggtgattatgagcgtgacctttgctgctgtaacaccaatgatagccattgggatgaacccggatatcggcctgctggggatatttggtgccactatcgccgcgggttttatcaccacattattagcgccacttatcggtcgcttgatgcctttattcccgccactggttaccggtgtggttattacttctatcgggcttagcatcattcaggtgggtattgactgggccgccggaggtaaagggaatccgcaatatggtaatcccgtttatttaggtatctcctttgccgtcttaatttttatcttgctcattactcgctatgcgaaaggatttatgtccaacgtcgccgtattactggggattgtatttggctttttacttagctggatgatgaatgaagtcaatttatccgggctacatgatgctagttggtttgcgattgttacgccgatgagctttggtatgccgattttcgatcccgtttccattctgaccatgactgccgtgttaatcatcgtgtttatcgagagtatggggatgttcctggcactgggtgaaatagtcggtcgtaaactctctagccacgatattattcgcgggctgcgtgtcgatggcgtagggacaatgataggcggcacgtttaacagcttcccccacacgagtttttctcaaaacgttggcctggttagcgtgacgcgcgttcatagccgctgggtgtgtatttctagcggaattatattaatcctgtttggcatggtgccaaaaatggcggtgctggtagcctccattccgcaatttgtgctgggcggcgctggtctagtgatgttcggcatggtactggcgacagggattcgaattctgagccgctgtaactacaccaccaaccgttacaacctctatattgtggcgatcagtctcggcgttggcatgactccgacgctctctcacgatttcttttctaagttaccggccgtactgcaaccgctgctacatagcggcattatgctcgcaacccttagcgccgttgtgctgaacgtcttctttaatggctatcagcatcatgctgacctggtgaaggaatccgtctctgataaagatttaaaagtcaggacagtacgtatgtggcttctgatgcgcaagctgaagaaaaatgagcatggagaataatatgaattttttaatgcgcgctatattcagtctgttgttgctttttactctctctattcctgtcatttctgactgtgttgcaatggccattgaaagtcgcttcaaatatatgatgctacttttttaaatggtttttacctgtcggcatccgctcaaaacgggcggttgtcgataaacgctcacttggttaatcatttcactcttcaattatctataatgatgagtgatcagaattacatgtgagaaattatgcaaacggaacacgtcattttattgaatgcacagggagttcccacgggtacgctggaaaagtatgccgcacacacggcagacacccgcttacatctcgcgttctccagttggctgtttaatgccaaaggacaattattagttacccgccgcgcactgagcaaaaaagcatggcctggcgtgtggactaacagcgtttgtgggcacccacaactgggagaaagcaacgaagacgcagtgatccgccgttgccgttatgagcttggcgtggaaattacgcctcctgaatctatctatcctgactttcgctaccgcgccaccgatccgagtggcattgtggaaaatgaagtgtgtccggtatttgccgcacgcaccactagtgcgttacagatcaatgatgatgaagtgatggattatcaatggtgtgatttagcagatgtattacacggtattgatgccacgccgtgggcgttcagtccgtggatggtgatgcaggcgacaaatcgcgaagccagaaaacgattatctgcatttacccagcttaaataaaaaaaccccgacatttgccggggttgtgagcataacgtaatgcttattttaccggacgcatcgccgggaacagaataacgtcgcggatggtatggctgttggtgaacagcattaccatacggtcgataccaattcccagacctgctgtcggcggtaagccatgttccagtgcggtgacgtaatcttcatcgtagaacatcgcttcgtcgtcacctgcgtctttcgcggcaacctgatccaggaagcgttgcgcctgatcttccgcgtcattcagctcgctaaagccgttaccgatttcacgaccaccaatgaagaactcaaagcggtctgtgatttccgggttaacgtcgttacgacgcgccagcggagaaacttctgccggatattcagtaatgaaggtcggctgaatcagatgtgcttctgccacttcttcgaagatctcggtaacgatacggcccagaccccagctcttctcaacgtggatgccgatagattcagcaattgctttcgcagagtcgaagttgtccagatccgccatgtcggtttccgggcgatatttcttgatcgcttcacgcatggtcagtttttcgaacggtttaccgaagtccagcgtcacgtcgccgtaggtcacttccgtcttaccgagaatatcctgtgccagagtacggaacaggctttcggtcagctcgatcagatctttgtaatctgcgtaagccatgtagagttccatcatggtgaactctgggttatgacgtacggaaataccttcgttacggaagttacggttgatttcgaatacacgctcgaagccaccaaccaccagacgcttgaggtacagttccggcgcgatacgcaggtacatgtcgagatccagcgcgttatggtgggtgataaacggacgcgcagcggcaccgccagggatcacctgcatcatcggcgtttcaacttccataaagccgcggttcaccatgaactggcgaataccagagaggatctggctgcgcactttaaaggtgttgcgggattcatcgttggagatgagatcgagataacgctgacgatagcgcgcttcctgatcctgcaagccgtggaatttatccggcagcggacgcagtgctttggtcagcagacgcaactcggtgcagtggatagacagttcgccggttttggttttgaacagcttacctttcgcgccgaggatgtcgccgaggtcccattttttgaactgctcgttataaacgccttccgggagatcgtcacgggcaacgtacagctgaatgcgaccgccaacgtcctgcagggtaacgaaagacgctttacccataatacgacgggtcatcatgcggccagcaacggcgacttcgatgttcagcgcttccagttcttcgttctctttgccgtcgaattctgcgtgcaattggtcagaggtatgatcgcgacggaaatcgttcgggaaggcaatcccctgctcgcgcaggttcgccagcttctcacgacgcgttttcagttcattgttaagatcgactaccgcgtcagcgccctgtgcgtgttgttcagacatgttggttcctcataaccctgctttcaaacttgcttcgataaattgatccaggctgccgtccagcacggcctgcgtgttgcgggtttctaccccggtgcgcagatctttaatgcgggagtcatcaaggacataagaacgaatctggctgccccagccgatgtcggatttgttatcttccatcgcctgtttctcggcatttttcttctgcatctccagttcataaagcttcgctttcatctgcttcatggcctgatctttgttcttgtgctgggaacggtcgttctggcactgggtcacgatcccggtcgggatgtgggtaatacgcaccgcagattcggtacggttaacgtgctgaccgcccgcgccggacgtgcgataaacgtcaatgcgcagatccgccgggttgatttcgatatcaatatcatcatcaacttccggataaacaaacgcggagctgaagctcgtgtggcgacgaccgccggagtcaaacgggcttttacgcaccaggcggtgaacgccggtttctgtacgcagccagccgtaagcgtaatcgccggagattttgatcgtcacggatttaatacccgccacttcaccttcgctctcttcgatgatttcagttttgaaaccacggctttctgcccagcgcagatacatacgctcaagcatgctcgcccagtcctgtgcttccgtaccgccagaccccgcctgaatatcgaggtagcagtcggcgctgtcatattcgccagagaacatacggcggaactcaagctgcgccagtttttcttccagggcgtcgagttcagcaacggcttcgttaaaggtttcttcgtcgtcagcttctacagccagttccagcagaccagaaacatcttccagcccctgtttcatttggtcgagggtgtcgacaacggcttcgagggaggaacgctctttacccagcgcctgtgcgcgttcgggttcgttccagacatccggctgttccagctcggcgtttacttcttccagacgctctttcttggcgtcgtagtcaaagataccccctaagaacgtcggagcgttccgtgaggtcctgaatgcgattatttaccggattaatttcaaacatggtctgatttcttttattgagctagtcaaaatgcggtgataagagcgggattgtacccaatccacgctcttttttatagagaagatgacgttaaattggccagatattgtcgatgataatttgcaggctgcggttgccgcgaaactcgttgatatcgagcttataagccagttgcacttcgcgcacgccgttatccggccagagggcggtatcgacattaaaagcaataccatccagcagtggaccgccgccgaccggttcgaccatcaccttcaaatgacgttcgcccaccagccgctgttgcagcagacggaaatgaccgtcaaacagcggctccgggaacatctgcccccacgggccagcatcgcgcagcagctgcgccacttccatggtcatttcggccgggcttaacggaccgtcacttaccacttcgccttgcaataggctagggtccagccactcagtaaccagttcgccaaaccgttgttgaaagagtttgaatttatcctcttccaggctcaaacccgccgccatcgcatgaccgccaaacttcagcatcatgccagggtagagtgtgtctaatcgctccagcgcatcacgcatatgcagcccctgaatggagcgaccggaacctttcagcgtaccgtcacctgctggcgcaaacgcgataaccggacggtgaaaacgctctttgatgcggctagccagaataccgacaacgccctgatgccattcggggtgatacattgccagcccgccgggtagcgtgtcacggctgcgctccagtttctcgcacagggtcagggcttcaatttgcattccttgttcgatctcttttcgcgtctggtttagcgcatcgagttcatttgccagcacgcgcgcttcgccgatgttgtcgcacaacaacagcgccacaccgacggacatatcgtccagtcgtccggcagcattgagacgtggccccagcgcaaaacctaaatcgctggcggcgagtttttgtgcatcacggtttgccacttcaagcagcgctttaatccccggacggcactttccggctcggatgcgactcatcccctgccaggtcagaatgcgattattagcgtccagcggcacgacgtccgccactgtccccagcgcgaccagatccagcagttctgccaggttaggaattgcgatgttacgctcatcaaaccagccctgatcgcgcaaaaaggtgcgcagcgccagcatcagataaaacgccacacccacgcctgccagacttttgctcgggaaattacagtcgcgcaagttagggttaatgatcgcttccgctgcgggtaatgtgtcgcctggcaaatggtgatcggtaacaataaccgggatgcccaagctgcgagcgtgctcaacccccgcatgggaggaaataccgttatccaccgtgacaattaactgcgcgccacgggcatgggcctgatcgaccacttccgggcttaagccgtaaccgtcttcgaaacggtttggtaccaggtagtcgatattgctgcaaccaaggctgcgcatcgccagcacgcttagagccgtgctggtcgcgccgtcggcgtcgaaatcaccgaccacaataatccgcgttccttcgcgaaaagcgttgtaaaggatctcaacggccttttcgacgccgctcagttgctgccagggcagcatacctttaacactgcgttccagttcttgcgcactgcgtactccccggctggcgtataaacggcgcagcaagggaggcaattcagcgggcaagtctgccgtttcatcgacttcacggcgacgaagttgtatctgttgtttcacgcgaattatttaccgctggtcattttttggtgttcgtcgaggaattctttcatctctttcggcggctggtaacccggaacaagtgtgccattgctcagcacaactgccggagtaccgctaacgccaagctggacgccaagtgcgtaatggtcggcaatatccacgtcgcaactggctggtgcgacgcttttacctgccatcacatcatcaaacgctttgtttttatctttcgcacaccagatagctttcatttctttctctgcatcgctgtccagcccctggcgcgggaaagcaagataacgcacggtgatccccagcgcgttgtagtctgccatttgctcatgcagtttgtggcagtaaccacaggtaatatcagtaaacacggtgatgacgtgtttttcctgcggcgctttataaacgatcatctctttttcaagcgcattcaactgctttaacagcatcttattggtgacattgaccggagccgtgccactaacgtcatacattggcccctgaatgatatgtttaccatcatcggtgatgtacaacacgccgctgttagtcagaactgtcttcatgccagctacaggcgcgggctgaatatcgctgcttttgatgcccattttggctaacgtttgttgaattgccgcgtcatcagcctgagcaaagccactaaacgccgctaacaaagtaaacaacataaaacctttcttcataaatcttcccgttcttttcagacatcacgcccgcgggtgatgctgttgatgaagttgccgcagacgctcggtagcgacatgcgtataaatttgcgtggtggagagatcgctgtggcccagtagcatctgcaccacgcgtaaatccgcaccatgatttaataaatgagtggcaaaagcgtgacgcaacacatgcggactcagcttttcgctgtcgatacccgccagcacagcataatgtttaatacggtgccagaaggtctgtcgcgtcatctgctgcgcacgctggctgggaaacaacacgtcaatactcacaccattcagcagccacggacgcccatgttccagataggtttccagccagtaaaccgcctcttcacctaacggcaccagacgctctttgttgcctttaccaatgacccgtaccacgccctgacgcaggctgatatcactcattgtcagtccgaccagttcagagacacgcagcccggtagcatacaacacttcaagcatggctttatcgcgtagctccagtggctgatcgattaatggtgcctgtaataaacgttcgacctgcgcttcgcttaaatcttttggcaaacgctggggcaatttcggactagcgagatgcgcactgggatcgtcttcacgaaacttttcgcgataaagatactggaacaatcggcgcactgcactcagcaaacgcgcactgctggtggctttatacccgccctccagccgttctgccagtaatgcctgcaaatcgtcactttgcgccgtcgccagcgtcaacccgcggtgatgcaaccactccaccatcatactcagatcgcgacggtaagcgttcaacgtattttcagccagatttttttccagccacagagcatcaagaaactgctcgatgcgtgccagatcctgtttcacttgcgccccttatggtcactcatttgatccattatgccttattgtgccgtgactaaagcgattctgatacactagccgcaaaagccacagcagaatcgagaagcttacgttatgaatatgggtcttttttacggttccagcacctgttacaccgaaatggcggcagaaaaaatccgcgatattatcggcccagaactggtgaccttacataacctcaaggacgactccccgaaattaatggagcagtacgatgtgctcattctgggtatcccgacctgggattttggtgaaatccaggaagactgggaagccgtctgggatcagctcgacgacctgaaccttgaaggtaaaattgttgcgctgtatgggcttggcgatcaactgggatacggcgagtggttcctcgatgcgctcggtatgctgcatgacaaactcagcaccaaaggcgtgaagttcgtcggctactggccaacggaaggatatgaatttaccagcccgaaaccggtgattgctgacgggcaactgttcgtgggtctggcgctggatgaaactaaccagtatgaccttagcgacgagcgtattcagagctggtgcgagcaaatcctcaacgaaatggcagagcattacgcctgatctcactgacggcttagcgcatatgctttgccgtcatctttatctttgcgtctcttgttgcaacaaaatccgccgtaaatcccgccattcagcttcgtccatgctgtcggctgccagccataaatgttgccgtttaccgccatcagaacgtaaacgcagcatcatgccgctcttaatcatccacggtgctttgacgatgctccactcctgcccttgccaacgcaaacgcccgtccatcaacaagcgaatttccccctggcgagcattaatacgccgctggctgcgaacgcaatcaaacaccaccaggctaagtaacaccatccataacggggtgtaactgagtggccagggcatgagtaaaataacagcggcaaccagcccatgaatcagcaaggaaagccactgtgcgcgccaggagacgcgcaaatcagattgccacaggaccacgttcccggttccgtgtctggatgagtcggaccatcatttccagttctgcatcggccggtttaccgtgattcatcagccagttaaacaggtccggatcgtcacattccagcagacgaataaagatgcgtttttcgtcatcgcttaagctgtcgtactcatgttcgaaaaacggcatgatactaatatcgagttcgcgcataccacggcggcatgcccaatgaatgcgggctttgttgttaatgtccatcttcttcctgtctcacgaaaatccagtacccggctattgtaacgtgtttttcgccttcttttacgggaatatcagtaaacaccatcgcgatcgcgaaattaattcacaacaattcaatggcttcatttttttggaagtcgcctcgcagaaggcacagatcgcgtagtgaaagcacttgcattgcctcatagctcttttaccattagtcattaatacgccgttaagcaactcaggactctattatggcttttacaccttttcctccccgtcagcctacggcttctgcccgtttaccgctgacgctgatgacgcttgatgactgggcgcttgccaccattactggcgcggacagcgaaaaatatatgcagggtcaggtgacagcagatgtcagccagatggcagaagatcagcacctgctcgccgcccattgcgacgccaaaggtaaaatgtggagcaatttacgtctgttccgcgacggcgatggctttgcatggattgaacggcgcagcgtgcgtgaaccgcagctgactgaactgaaaaaatatgcggtattctctaaagtgaccatcgcgccagacgacgagcgtgtgctgcttggtgttgccggttttcaggcgcgcgccgcgctggcaaatctctttagcgaactgcctagcaaagaaaaacaggtagtcaaagaaggcgcgaccactttgctatggtttgaacacccggcagaacgtttcctgatcgtaaccgatgaagctactgctaatatgctgaccgataaactgcgcggtgaagcggaactgaacaatagccaacagtggctggcattaaacattgaagcgggtttcccggtgattgatgccgccaacagcgggcagtttatcccacaggcgaccaatctccaggcgctgggcggtatcagctttaagaaaggctgttataccggacaagagatggtggcgcgagcaaaattccgtggtgccaataaacgtgcgctctggttgctggcaggtagcgccagccgactgccggaagctggtgaagacttagagctgaaaatgggcgagaactggcgtcgtaccggtacggtactggctgcggtaaaactggaagatggtcaggtcgtggtacaggtcgtcatgaataacgatatggaaccggatagcatcttccgcgtacgcgacgatgcgaatacattgcatatcgagccgctgccgtatagcctcgaagagtaaatctctttatcgcatcaggcatttatcgcctgatgcgacgctggcgcgtcttatcatgtctgggatttgatgcctttatcacaacagggacgaggcccgtagatcggataaggcgttcacgccgaatccggcagttgtgctccgatgcctgatgcgacgctggcgcgtcttatcaggcctacaaaggcatacccattacgcctgcccaatatacaaatagatcgccagaaagtggcacacactaccgccgagcacgaagccgtgccagatggcatggttgtatggaatgcgtttgcagacgtagaaaatcaccccgaggctataaaccacgccgcctaccgccagtaaggtaacgctgcccgccgcgagcttaactgccatttcataaattaccaccaggctcagccagcccatcgccagataggtcaccagagataaaattttgaatcggtgcgcgatggtcagtttaaacagaatacccagcaatgccaggctccagataacaatcatcaacccgcgcgctaacggagaatccagccccaccagcaaaaacggcgtgtaggttccggcaatcaacaggtaaatagcgcaatggtcaaatttcttcagccacatttttgcccgttgatgaggaatggcgtgatagagcgtgctagcgaggaacagcaggatcatactgccgccatagaggctgtagctggttatcgctgtggcgctggcattaagatccaccgcctgaaccagtagcaacaccagcccaacgataccaaacaccaacccaatgccgtgactgacgctgttggctatttcctctgccagactatatccctgcttaatgaggggcttctgaaccataacttactccggagaaacgtacacgcacatgtatacctctccagcgtaactgagaatagttccagtgaacacctgttagctaaaataaattctgatttgagactaatctcctaaaaatcatgaaattaaatgcgaaatttcaactaacaggcgtgagttcaatttaaagacatttaaattcaatcacataaaattgtgtctgaccgggatagatgtcagcaatgacttttttcagttcagtcagggtcatattttcctgctctgcatgtttttcagtcagcgtatccagcgttacggtactggttgcggtgacttcaatcgtgcaaaaataaccgtcatcttcaaaacgtccgacacgaagcacatcacccgttttgaagtggctttcagactcgtcgcggatggtgatggttttacgcccagccagaatgtcatcctggaaacgttgaaaaaaagtgatgtcgtttggctgcatggtactatttcctgtaagaattgactcatctggagcctatgatagtgaaaaaactcaccttaccgaaagatttcttatggggcggcgcagttgccgctcatcaggtcgaaggcggctggaacaaaggcggaaaagggccgagcatttgtgacgttctgaccggtggcgcacacggcgtgccgcgcgaaatcaccaaagaagtcttgccaggaaaatactatccaaaccatgaagccgttgatttttatggtcactataaggaagacatcaagctatttgccgaaatgggcttcaaatgttttcgtacatccattgcctggacgcgcatttttccaaaaggcgatgaagctcagccaaacgaagaagggctgaagttctacgatgatatgttcgatgaactgctgaaatacaacatcgaaccggtgatcaccctctcccactttgaaatgccgctgcatctggtgcagcaatacggtagctggaccaaccgtaaagtggttgatttctttgtacgtttcgcggaagtggtatttgaacgctataagcacaaagtcaaatactggatgaccttcaacgaaattaacaaccagcgtaactggcgtgcaccgctgttcggttactgctgctccggcgtggtgtataccgagcatgaaaacccggaagagacgatgtatcaggtgctgcatcaccagtttgtcgccagcgccctggcggtgaaagctgcgcgtcgcattaacccggagatgaaagtcggctgtatgctggcgatggtgccgctctatccttactcctgtaacccggacgatgtgatgttcgctcaggagagcatgcgcgaacgctacgtctttaccgatgtgcagctacgcggctattacccgtcctatgtgttgaacgagtgggagcgtcgcggatttaacatcaaaatggaagacggcgatctggatgtgctgcgtgaaggcacctgcgattatcttggtttcagctattacatgaccaatgcagtgaaggccgaaggcggcaccggcgatgcgatctctggttttgaaggcagcgtaccaaacccgtatgttaaagcatctgactggggctggcagattgatccagtaggtctgcgctatgcactttgcgaactgtatgagcgttatcagaggccgctgtttattgtcgaaaacggttttggcgcttacgacaaagtggaagaagatggcagcatcaacgacgactaccgcattgactacctgcgcgcccatatcgaagagatgaaaaaagcggtgacttacgatggcgtggatctgatgggctacacaccgtggggctgcatcgactgcgtgagcttcaccaccgggcagtacagcaaacgctacggctttatctatgtgaataaacatgacgacggtactggcgatatgagccgtagtcgtaagaagagctttaactggtacaaagaggtgattgccagcaacggcgagaagctttaagtcgatgaagtaccggatgcaatacttgttgcatccggtcagacaacttccctgttttatttcccgcccgccaaatcgataaaacttcccgtgacgtaagaggctttatcacttagtagccagacaatggcctgcgcgacctcttctgcctgtccaccacgctgcatggggatgttgctcttaacgcgatcgacgcgtccaggctcgccgccgctggcgtgcatttcggtataaataaaccctggccgcacgcagttaacgcggatcccctgcgcggcgacttccaggcttagtccggtggttaacgtatcaatcgcccctttgcttgccgcgtaatcaacatattcccctgggctacccaaccgactggccacgctagagacattgacgatagcgccgccactgccaccatttttaagcgccatgcgttttaccgcctcgcggcagcagagaaaatatcccgtcacgttggtggaaagtactcggttgattcgctctgcggtaaggttttcaacggtgcactgggtaaacaagatcccggcgttattgaccagcgctgctagcggttcatcgtgctgatcgattgctgtaaacatcgcaacgacctggttttcgtcgctgatatccgcctggagcacgaatgctttgccaccggcttgcgttattaagttcatcacttcctgcgccgcgtggaggttttgctgataattaaccgccaccgtatacccttcttgcgccaacagtaatgcagttgcccgcccgatgccgcgactgccaccagtcacaagtgctatagccatttgtttttccgagaaaaattaattcgttgacgtatctttgagattgctaacaaactggctcaatcttcaatgttggcacgcttttccccctcgccctttcagggagagggccggggtgagggtaaatattcgcgccagtgccggcctgttcccctcaccctaaccctctccccaaaggggcgaggggactgtctgagcacttttgtactttgtcatctgactaaaaaggcgccgaagcgcctttagaaaatagtcgaatcagtgaattactggtattcgctaatcggtacgcaggagcagaacaggttacggtcgccgtaaacatcatccagacgtttcactgtcggccagtatttgtctgccacacctgccgggaataccgcaacttcacggctgtacggatgcgcccactcggcgaccagttcgctctgaatgtgcggcgcgttcaccagcgggttatcttccagcggccagacaccggctttcacctggtcaatttctgcgcggatagccagcatcgcgtcgataaagcgatccagttccactttgctttcagattcagtcggttcaaccatcagcgtacccgccaccgggaagctcatcgtcggcgcgtggaaaccgtagtcgatcaggcgcttggcaatatccagctcgctgatgccggtttcttctttcagcgggcgaatatcgagaatacattcgtgcgccacgcgaccgtcgcgaccggtatacagcaccgggaaggcatcctgcaggcggctggcaatatagttggcgttgaggattgccacctggcttgcttttttcagcccttctgcgcccatcatgcggatgtacatccagctgattggcaggatagaggcgctaccgaacggtgccgcagaaaccgcgccctgacgggttaacatgccttcgatttgcaccacgctatgacccggtacaaacggtgccaaatgcgctttcacgccgatcggtcccatacccggaccaccaccgccgtgcggaatgcagaaagttttatgtaggttaaggtgactaacgtccgcaccaataaagcccgggctggtgatgccaacctgggcgttcatgttcgcgccatcaaggtaaacctgaccgccgaactgatgcacgacttcacacacttcacggatcgtttcttcatacacgccgtgggtagaaggataagtcaccatgatacaggagaggttatcgcccgcctgttccgctttcgcgcgcagatcagtcagatcgatgttgccgtttttatcacacgccacaaccaccacctgcattcctgccatatgtgcagaagcggggttagttccgtgcgcagaagccgggatcaggcagatatcgcgatgcccttcgttgcggctttcatgataatgacgaatcgccagcaggcccgcgtattcgccctgtgcgccagagttcggctgcatacaaacggcgtcgtaaccggtcagtttcaccagccagtcagccagctgcgcaatcatctgctgataaccttcggcctgctccggcgggcagaacgggtgcagttcggcaaattccggccaggtgattgggatcatctcggcggcggcgttcagtttcatggtgcaggaacccagcgggatcatcgcctgattcagcgccagatctttacgctccaggctgtgcatatagcgcatcatttcggtttcgctgtggtagcgattaaacaccggatgggtgaggatttcgtcgtcgcgcagcatcgcaggctggatagagcggctgtcgtgagccacgtctttgtccagcgtgtcgatgtccaggccgtggttatcgcccagcagcacgttgaaaagctgcattacgttttcacgcgtggttgtttcatcaagggtgatcccaaccgcgttcagaatatcgctacgcaggttgatttcagccgcttcggcacgcgtcagtacgcccgctttgtcggccacttccacacacaaggtgtcgaaatagtgcgcatggcgcagtttcagacctttttgttgcaggcccgccgccaggatatcggtcagacggtgaatgcggttagcgatacgtttcaggccaaccgggccgtgataaacggcatacaggctggcgatgtttgccagcagtacctgggaagtacaaatgttggagttcgctttctcacggcggatatgttgctcgcgagtctgcatcgccatgcgcagcgcggtattgccagctgcatctttgcttacaccgataatacggcccggcatactgcgtttgtattcatctttcgccgcaaagaatgccgcgtgtgggccaccgtagcccatcggcacgccgaagcgttgcgcgctaccaaaaacaatatccgcgccctgtttacccggcgcagttaacagcaccagcgccataatatcggcggcaacgctgaccacaattttgcgacttttcagttcgctaataagcgcagtgtagtcgtgaatttcaccggtagtgcctacctgctgtaacagcacgccgaagacgtcctgatggtcgagcactttttgcgcgtcatcgacaatcacttcaaaaccaaaggtttcggcacgagtacggaccacatccagcgtttgcggatgcacatcggaagccacgaagaagcggttggcatttttcagtttgctgacgcgtttcgccatcgccattgcttcggcggcagcggtggcctcgtccagaagagaagcagaggccatatccagtccagtcaaatccagcgttacctgctggaagttgagcagtgcttcaaggcggccctgggagacttcaggttgatacggagtgtacgcggtataccagcccggattttccagcatgttacgcaggataaccggcggtagctgcacggcggtgtaacccatgccgatgtaagacgtgaagcgtttattgcgactggcaatagccttgagttctgccagtgcggcgtattcggtcgccggtgcgccaacctgcggtggtgtcgcaagttgaatatctttcggcacaatctggccggtcagcgcgtttaagctttgtgcaccaacggcattcagcatttcttgctgttgcgcggcgtccggtccgatatggcgttcaataaaagcgccgctgttttcaagctggcttaacgtctgtgtcatgagcgatggttcctgaaacgtgcagtgaattgtgaacctctctccttacgaagagagtgagggtgaggcataaattttcctcaccctgatcctctcccgcagaagaggaataaagccgttactcgtcttctaacaatgcttcgtatgcggtcgcatccagcagactttccagttcgctttcatcgctggctttgattttaaagatccagccgcctgcatacggttcgctgttcaccagttccggggaatcgctcagtgcgtcgtttaccgccacgatttcaccgcttactggcgcataaatgtcactcgccgcttttacgctttcggcaaccgcgcagtcatcgcccgcgctaaccgttgcgcccacttccggcaggtcaacaaacaccatatcgcctaacagctcctgagcatgttcggtaataccaacggtgtaagtgccgtcggcttctttacgcagccattcgtgttctttgctgtatttcagttctgctggtacgttgctcatcaatcaatctccaaaaaagtaaatcacgcgacggctttgccgttacgcacaaaaacaggttttgtcactttaaccggcatttcacggttgcgaatttgcacaatcgccgtttcgccaataccttccggcacgcgcgccagcgcaatgctgtaacccagcgtcggggagaaagtaccgctggtgataatgccttcatgctggttgccctgcgcatcggtaaagcgtaccggcagttcattacgcagcacgcctttttcggtcatcaccagaccaaccagtttttctgtaccatgctcacgctgcacttccagggcttcacgaccgataaagtcacgatctgccggttcccaggcgatggtccagcccatgttggcggctaaaggagagatggtttcgtccatctcctgaccataaagattcatgcccgcttccagacgcagcgtgtcacgcgcgcccaagccacatggcttaacacccgcttccaccagcgcacgccagaaatcggccgctttttcattgggcagcgcaatttcatagcccgcttcaccggtataaccagtggtggcaataaacagatcgcccgcctgcacgccaaagaacggtttcatcccttccaccgcctgacgctgggcgtcattaaacagtgtggcagcttttgcctgcgcattcggcccttgcacggcaatcatggaaaggtcatcacgaacggtaatttcgatgccgaaaggttcagcgtgttgggtaatccaggagaggtctttttcgcgggtggcggagttaacaacgaggcggaagaaatcttcagtaaagtagtagacgatgaggtcatctatcacaccgccagaggcattcaacatcccgctgtaaagggctttgccgcttttggtgagcttcgccacatcgttcgccagcagataacgcagaaactcccgggtgcggctgccgcgaagatcgacgatggtcatatgactcacatcaaacattccggcatcggtacgtaccgcatgatgttcgtcgatttggctaccgtaatgcagcggcatcatccagccgtggaaatccaccatgcgagcgccgcaaagcgtgtgttgttcgtacaaaggagtctgttgtgccatcttgtcctcattgaataagcggggctgacaactttttcatggtgaaattatcaccacgaaacccagcatcggagccactcccggtccccaacgcaatcgttctcttttgcctgaacttaccaccgaaacagactgttaaccataaggtaaaattgatcatcacattagcttatggttaaaaaatgcaaaaatcgcgacagaataaaaaaccaaaaaatacaccagtttctatacaaagatgatgtgatgagaaagtcaatttgaataagacaatattaagagctaaaaaaatgtcaaaaaacactaaatcaaaaaataatggcattagaaaatataatgcgaaaacggaggtgaaattagtttatttcaaatgaggaaaatctcccggcgaaaaaaccgggagatgaaagtgtgatgggtatcaaataaacaacagaggagaaatttttaacgcagccattcaggcaaatcgtttaatcccattgcctggcggataagttgcggcttaacgccaggaagcgtgtcggccagtttcaaaccaatatcacgcagcagttttttcgccggattggtaccggaaaacagatcgcggaatccctgcataccagccagcatcaacgccgcactgtgcttgcggctacgctcatagcgacgcagataaatgtactgcccgatgtctttcccctgacgatgcaaccgtttcagttcggcaatcagctctgcagcatccataaagccgagatttaccccctgccccgccagcgggtgaatggtatgtgcggcgtcgcccaccagcgccagacggtggctggcaaactggcgcgcataacgccccgtcagtgggaacacctgacgcgcgctctcaaccttgcataagcccaggcgattatcaaaagcgatatttaacgcgcgattaaattcgtcttcacttgcctgctgcatccgctgcgcttcctctgggctcagactccagacaatgctgcaaagatgcggatcgctaagcggtaaaaaggccagaatgccttcgccatggaaaacctgccgcgccaccgcatcatgcggttcttccgtgcgaatggtcgctaccagcgcgtgatgctgataatcccagaaagtcagcggaatatcggctttgttgcgcaaccaggaattagcgccgtccgcgccaatcaccagacgcgccgttaacatgctgccatctttcagcgtcaggaaggtttcattttctccccaggcgacctgctgtaattctgcgggggctaacagagtgatatcactgctctgatgcgctttgttccacagcgcgtagtgaatcacactattttcaacgatatgcccaagatggctatagcccatgctttgatcgtcaaagctaatgtgaccaaagctgtctttgtcccacacttccataccgtgataacagctggccctacgagagagaatgtcctgccagacgccaagacgggtgagtaatttttcgctggcggcattgatagcgctaacgcgcagttgtggtggtgcattcgccgccagaggttcctgtacgcgctgctccagtacggcaacgcgtaagccgctcccctgtaagccacaggcaaccgccagccccaccatgccgccgccaacaatggctacatcaacactttgcattgtttattccttaaaaccgccttcaacgcgccacccaaccgagggtgcgctgcgccagcacatcgcgtgccggggtgaataattccatcgtcatcagcccgatgttgcgcccgacaaccagcggtgcccaacggttggcaaaaagatgtacaaggctgtccgtgacgccaatggttgcttcgcgatcgctctgtcgacgctgctgataacggcacaatacgccgtaatcccccatgtcttctccgcgctcctgcgcctgagtcagggtttccgcaagactcatcacatctcgcataccgaggttaaacccttgcccggcaatcgggtgcagagtttgcgccgcattgcccaccagcacggtacgatgggtaatagatctggcggcgtgggttaacgccagcggataagcactgcgtttaccagcgtgggtaattttcccaagtcgccagccaaaggcgctctggagttcacggcaaaacttctcgtcactccagctcaacacctcttcgcgccgttccagtggatgacaccagaccaggctacagcgtccgtcagacatcggcaacatcgccagcgggccatgttgcgtaaagcgttcaaaagcgcgcccttcatgcgcaacggaagtagcaacgttggcaatcacggccagttgttcgtaaggctcctgctgccagtcaacgccgcacgcggtggctaacgcactatgggtgccatcagctgctaccagcacgcggcccgtcagcgtctcgccactctccagcgtcacttcaacgtgactctgagtacgggcaacgttagccacgcgatcagggcaatgcagcgttacgccaggtgctttacgcagcaatgcaaacagccgttgcccgacattgtgcaattcgacaacctgtcccagcgccgccagttggtaatcttctgcggcgagggtgacaaatccagcgtgaccacgatcgctgacatgcacggtggtgatggcagttgcgcaatccgccagagattgccagacgccgatgcgcgccagttgctgacaggtacccgccgccagcgctatcgctcgtccatcaaagcccggatgagcatgactctctggcgcagtcgcttcaatcaaatgtaccggcagcgccccgtgacttaaccgggaaatagccagcgccagcgtcgcgcccgccatgccgccaccgacgatgattacgctcattgctttctcgcagcaaccatcaacgcttcgatttcttccggctttttcaccacgctggcggtgaggttttcgttaccggtttcggtaatcacaatgtcgtcttcaatacgaatgccgataccgcgatattgttctggcacttctgcatccggcgcaatatacagccctggctctacggtcagtaccatgcccggttccagaatgcggctgcgatcctgaccataaacacccacgtcatggacatccagtcctaaccagtggctaaggccatgcataaagaaaggacgatgggcgttctgagcgatcagttcatcaacatcacctttcaggatgccgagttttaccaggccgctaaccatgatgcgcaccacttcaccagtgacttccagaatggaagttcccggacgatacaggcgcaggctggtttcgagagactccagcacaatgtcgtagatttcacgctgggcctgggtgaatttgccgttgaccgggaaggtgcgggtaatatcgccagcgtaacctttgtattcacaacccgcgtcaatcaacaccaggtcgccgtcgcgcatttcacactcgttttcggtgtagtgcagaatgcagccgttttcaccgctgccgacaatggtgttataggacggatagcgcgcaccgtggcggttaaattcgtggtgaatttcgccttccagatggtactcgaacattcccggacggcatttttccatcgcccgtgtatgtgccatggcggtgatttctcccgcgcggcggagtacggcaatctcttctgggcttttgaacaggcgcatttcatgaacaacaggacgccagtcgatcatcgttgccggtgcggtgagattttgccggctacctttacgcagtttttccagcgcactgttcacgattacatcagcatatgcatattcgccctgggcatggtaaaccacatccaggccgttaagtagttgataaagttgctgattgatttcgctgaatgccagtgcgcggtcaacgcccagtttctctggcgcggcatcctggcctaagcgacggccaaaccagatctccgccgtcaggtcgcgaacgcggttaaacagaacgctgtggttatgagtgtcatcgcttttaatcagcaccagcaccgcttccggttcgttaaagccggtgaagtaccagaagtcactgttctgacgataggggtattcgctgtcggcgctacgtgttacttctggtgcagcaaaaatcagcgcggcgctgccgggttgcatttgctccaccagggcctgacggcgacgctgaaactcttgccgggatatctcactcataacactctccttacgttttttgtttttagtgtagagtcggtttttgtacttctggcgcggtcggttgcggatgagtaaaggtgtcgtggcataacagcgcggcaacacgaacgtattcgatgatctcttcaaggctcatttcaagctcttcctgatcttcgtcttcgtcgtaacccagttgcgcaatgttacgcagatcgtcgatagcttcaccggtttcgccggtcactttatccagcttcggttgcgtaacgccaagaccaagcaggaagtgattgacccaacctgccaatgcatcagcccgatcgaaaacgctgacatcatcgccatcaggcagataaagctgaaaaaggaagccgtcatcctgcagggcatcgctggtggcagagtgcattttacgcagtgcctgtgccagctcatgaccgaaagccatgccttcgttcgtcaggtcgtgaagtagcggtagccaactgctgtcatcgttaccgccacatatcatcccgctgattaaaccatgcatctcagctggggtcagacccgtcccttgttggttcagatactggttcatttcgttgtaaccaggcatttcgttctgtatagacataagcattcgtcgtcaaagggaggaatattcatgatatgctaccactttgggccctggtggaccagaaaagggcttgtctcttctcatcagggtagctatagtgtcgccccttcgcagaccatgggtctaaagacgaaggcagcgcagtcaatcagcaggaaggtggcatgtctgcacaacccgtcgatatccaaatttttggccgtagtctgcgtgtgaactgcccgcctgaccaaagggatgcgttgaatcaggcagcggacgatctgaaccaacggttgcaagatctgaaagaacgcactagagtcacaaatactgaacagttggtcttcattgccgcattgaatatcagctatgagttagcgcaagaaaaagcaaagactcgtgactacgcggcaagtatggaacagcgtattcggatgctgcagcagaccatagaacaagcgttacttgaacaaggtcgcatcaccgaaaaaactaaccaaaactttgaatgacacttttcggtttactgtggtagagtaaccgtgaagacaaaatttctctgagatgttcgcaagcgggccagtcccctgagccgatatttcataccacaagaatgtggcgctccgcggttggtgagcatgctcggtccgtccgagaagccttaaaactgcgacgacacattcaccttgaaccaagggttcaagggttacagcctgcggcggcatctcggagattcccttcttatctggcaccagccatgacgcaactaccagaactcccactgacattatcccgacaagaaatccgcaaaatgattcggcaacgtcgtcgtgcgttaacgccggaacaacagcaggaaatgggtcaacaagccgctacccggatgatgacttatcccccggtggtgatggcacatacggtcgctgtattcctctcttttgatggcgaactcgacacccagccactcatagaacaactctggcgcgccggtaagcgcgtatatcttccagttttgcatccctttagtgccggtaatttgctgttcctgaattaccatccgcaaagcgaactggtgatgaacaggttgaagatccatgagccaaaattggatgtgcgtgacgtgctacccctttcccgattagacgtgctgatcacaccgctggtcgcctttgatgagtacggtcagcgcctgggaatgggcggtggtttttatgatcggaccttacaaaactggcagcactataaaacgcaaccggtgggttatgcgcatgattgtcagttggtggaaaaactccccgttgaagagtgggatatccctcttcctgcggtggttacaccgagcaaagtctgggagtggtaagggcgatacacccgcatcgccctgattgacatcgttgattctttgacctaatttagtgagtaagggtaagggaggattgctcctcccctgagactgactgttaataagcgctgaaacttatgagtaacagtacaatcagtatgatgacaagtcgcatcataacccttctccttcaagccctcgcttcggtgagggctttaccgttacagccccatgctgccctgccatcgtaaatccccattaaataaacacaacgcattgatctgactttgatttattttctggagcagactcgcaaagtagaatgcgcaacgcggcaacggtgtggagaagggataaaaaaacgggcaagtcagtgacctgcccgttgattttcagagaaggggaattagtacagcagacgggcgcgaatggtacccggaatagctttcattgcctgcagcgctttttcggcaacgtcttcgtcggcttcaatatcaataaccacataacccatctgggcggaagtttgcagatattgcgcggcgatgttgacgccctgctcggcgaagattttgttcagcgcagttagcacgcccggacggttttcgtggatgtgcatcagacgacgcccaccgtgcagtggcaggctgacttccgggaagttcaccgcagagagcgtactgccattgtcagaatacttgatcaatttacccgcaacttccaggccgatattctcctgcgcttcctgagtgctaccgccaatgtgtggcgtcagaaggacgttgtcgaattcacacagcggagaggtaaatggatcgctattggtcgccggttccgtcgggaatacgtcgattgccgcccccgccagatgtttgctcgccagcgcatcacacagcgccggaatatccaccacagtaccgcggctagcattaatcagcaggctgccgggcttcattagactaatttctttcgcgcccatcatatttttggtggacggattctctggtacatgcagactcaccacatcgctcatattcagcaggtcagaaagatgctgtacctgagtggcgttgcccagcggcagtttattttcaatatcataaaagtaaacatacattcccaggctttcagccagaatgcccaattgcgtaccaatatgaccgtagccgatgatacccagctttttgccgcgcgcttcaaaagaacccgccgccagtttgttccacacgccacggtgcgctttagcattggcttccggcacgccgcgcaatagcagcagcagttcgccaatcaccagctccgcaacagagcgcgtattactgaacggtgcgttaaataccgggatcccgcgctttgccgccgcatccagatcaacctggtttgttccgatacagaaacagccaatagcgaccagtttttctgcggcgttgatcacgtcttcagtcagatgggtacgggatcgcaggccgatgaagtgggcatcgcggatggattcttttaattgttcatcatccagcgcgcctttgtgaaattcgatgttggtgtaaccagctgcacgaaggctttccagcgccttttggtgcacgccttctaccagcagaaacttaatcttgtctttctccaggcttacctttgccatttacccaatcctgtcttttgaaatgttgtgtgcggatttgcatccgcctttcaacatatcaaaaaataatattgcggcaatatgaacgtttgcgtcgcgatgttgaggaaatatcacgcaaaggtaattcttggatgaatatgctggtttagaggatttatttagagcaatcgacaattgcctggtaaaagcgtgacacatgtcaccaaatttaatgaagagaatttttttaacgggggaggttcccccgtcagatcatttcacaatggttttgacaccgtcaggtgtgccaatcagcgcaacgtccgcgccacggttagcaaacaagccaacagtcaccacgccaggaatcgcatttatggcgttttccatcgctatcgggtcaaggatttccatgccgtggacgtcgaggatcacgttgccattatcggtcaccacgccctgacggtattccggacgaccgcccagtttcaccagctgacgcgccactgcactacgtgccatcgggataacttctactggcagcgggaatttacccagaatatcaacctgcttggaagcgtctgcaatacagataaatttttctgcaacgctagcaatgattttttcacgggtcagcgccgcgccgccgcctttgatcatttgcatgtggccgttgatttcatctgcgccatcaacgtagatgccaaggctgtcgacttcgttgagatcaaaaacgtgaatgccgaggcttttcagtttttcagtggaagcatcactactggaaacggccccttcaatctggcctttcattgtaccgagcgcgtcaataaagtgtgcggcggtggaacctgtacctacaccaacaatggtgccgggctgaacatactgaagtgccgcccatcctactgcttttttcaattcatcctgcgtcatgatcgtttcgcctgtggtatgaaatttcacacgcattatatacaaaaaaagcgattcagaccccgttggcaagccgcgtggttaactcatccataaaatatcgcgcaatggcaggcatcccctttcgccccgcaaataaagcatacaacggtctgggtatgccgctccacggtgcaaacaggcgcaccagttcaccgttcgcaagcccctgtttacaggcaaattgaggcaataacgccacgccattcaacacaaccagggcgcgaactcgctgagcgaaatgcattagcgcaaatccctgatcttttaagctgcgcttttaaccacggatacaaatgttacccgccgacggcttcggtatatgcaacctgacacaaaattgtgtcatagtgcaggaaaaagcatttaccaggagcagacaacagcaatgaaacgcccggactacagaacattacaggcactggatgcggtgatacgtgaacgaggatttgagcgcgcggcacaaaagctgtgcattacacaaagtgccgtcagtcagcgcattaagcaactggaaaatatgttcgggcagccgctgttggtgcgtaccgtaccgccgcgcccgacggaacaagggcaaaaactgctggcactgctgcgccaggtggagttgctggaagaagagtggctgggcgatgaacaaaccggtagcactccgctgctgcttagtctggcggtcaacgccgacagtctggcgacgtggttgcttcctgcactggctcctgtgttggctgatagccctatccgcctcaacttgcaggtagaagatgaaacccgcactcaggaacgtctgcgccgcggcgaagtggtcggcgcggtgagtattcaacatcaggcgctgccgagttgtcttgtcgataaacttggtgcgctcgactatctgttcgtcagcagtaaaccctttgccgaaaaatatttccctaacggcgtaacgcgtagcgcattactgaaagcgccagtggtcgcgtttgaccatcttgacgatatgcaccaggcctttttgcagcaaaacttcgatctgcctccaggcagcgtgccctgccatatcgttaattctagtgaagcgttcgtacaacttgctcgccagggcaccacctgctgtatgatcccgcacctgcaaatcgagaaagagctggccagcggtgaactgattgacttaacgcctgggctatttcaacgacggatgctctactggcaccgctttgctcctgaaagccgcatgatgcgtaaagtcactgatgcgttactcgattatggtcacaaagtccttcgtcaggattaatccatcaaataatgcctgatagcacatatcaggcgttgtcctcacttctttttgtattccttgaatcacatcacaaaatagacaaatctcaggcggcaaaaaacgacgtctgaatgcattttttttgctggcgacaaacccacgtaaaaagctcaccgtaggcgcaaataccctcattttgattgcgttttacggagcaaataatgtctaacgtgcaggagtggcaacagcttgccaacaaggaattgagccgtcgggagaaaactgtcgacagcctggttcatcaaaccgcggaagggatcgccatcaagccgctgtataccgaagccgatctcgataatctggaggtgacaggtacccttcctggtttgccgccctacgttcgtggcccgcgtgccactatgtataccgcccaaccgtggaccatccgtcagtatgctggttttagtacagcaaaagagtccaacgctttttatcgccgtaacctggccgccgggcaaaaaggtctttccgttgcgtttgaccttgccacccaccgtggctacgactccgataacccgcgcgtggcgggcgacgtcggcaaagcgggcgtcgctatcgacaccgtggaagatatgaaagtcctgttcgaccagatcccgctggataaaatgagcgttagcatgaccatgaatggcgcagtgctaccagtactggcgttttatatcgtcgccgcagaagagcaaggtgttacacctgataaactgaccggcaccattcaaaacgatattctcaaagagtacctctgccgcaacacctatatttacccaccaaaaccgagtatgcgcattatcgccgacatcatcgcctggtgttccggcaacatgccgcgatttaataccatcagtatcagcggttaccacatgggtgaagcgggtgccaactgcgtgcagcaggtagcatttacgctcgctgatgggattgagtacatcaaagcagcaatctctgccggactgaaaattgatgacttcgctcctcgcctgagcttcttcttcggcatcggcatggatctgtttatgaacgtcgccatgttgcgtgcggcacgttatttatggagcgaagcggtcagtggatttggcgcacaggacccgaaaagtctggcgctgcgtacccactgccagaccagtggctggagcctgactgaacaggatccgtataacaacgttatccgcaccaccattgaagcgctggctgcgacgctgggcggtactcagagtctgcataccaacgcctttgacgaagcgcttggtttgcctaccgatttcagtgcacgcattgcccgcaacacccagatcatcatccaggaagaaagtgaactctgccgcaccgtcgatccactggccggatcctattacattgagagcctgaccgatcaaatcgtcaaacaagccagagctattatccaacagatcgacgaagccggtggcatggcgaaagcgatcgaagcaggtctgccaaaacgaatgatcgaagaggccagtgcgcgcgaacagagcctgatcgaccagggcaagcgtgtcatcgttggtgtcaacaagtacaaactggatcacgaagacgaaaccgatgtacttgagatcgacaacgtgatggtgcgtaacgagcaaattgctagcctggaacgcattcgcgccacccgtgatgatgccgccgtaaccgccgcgttgaacgccctgactcacgccgcacagcataacgaaaacctgctggctgccgctgttaatgccgctcgcgttcgcgccaccctgggtgaaatttccgatgcgctggaagtcgctttcgaccgttatctggtgccaagccagtgtgttaccggcgtgattgcgcaaagctatcatcagtctgagaaaagcgcctccgagttcgatgccattgttgcgcaaacggagcagttccttgccgacaatggtcgtcgcccgcgcattctgatcgctaagatgggccaggatggacacgatcgcggcgcgaaagtgatcgccagcgcctattccgatctcggtttcgacgtagatttaagcccgatgttctctacacctgaagagatcgcccgcctggccgtagaaaacgacgttcacgtagtgggcgcatccagtctggctgccggtcataaaacgctgatcccggaactggtcgaagcgctgaaaaaatggggacgcgaagatatctgcgtggtcgcgggtggcgtcattccgccgcaggattacgccttcctgcaagagcgcggcgtggcggcgatttatggtccaggtacacctatgctcgacagtgtgcgcgacgtactgaatctgataagccagcatcatgattaatgaagccacgctggcagaaagtattcgccgcttacgtcagggtgagcgtgccacactcgcccaggccatgacgctggtggaaagccgtcacccgcgtcatcaggcactaagtacgcagctgcttgatgccattatgccgtactgcggtaacaccctgcgactgggcgttaccggcacccccggcgcggggaaaagtacctttcttgaggcctttggcatgttgttgattcgagagggattaaaggtcgcggttattgcggtcgatcccagcagcccggtcactggcggtagcattctcggggataaaacccgcatgaatgacctggcgcgtgccgaagcggcgtttattcgcccggtaccatcctccggtcatctgggcggtgccagtcagcgagcgcgggaattaatgctgttatgcgaagcagcgggttatgacgtagtgattgtcgaaacggttggcgtcgggcagagcgaaacagaagtcgcccgcatggtggactgttttatcagcttgcaaattgccggtggcggcgatgatctgcagggcattaaaaaagggctgatggaagtggctgatctgatcgttatcaacaaagacgatggcgataaccataccaatgtcgccattgcccggcatatgtacgagagtgccctgcatattctgcgacgtaaatacgacgaatggcagccacgggttctgacttgtagcgcactggaaaaacgtggaatcgatgagatctggcacgccatcatcgacttcaaaaccgcgctaactgccagtggtcgtttacaacaagtgcggcaacaacaaagcgtggaatggctgcgtaagcagaccgaagaagaagtactgaatcacctgttcgcgaatgaagatttcgatcgctattaccgccagacgcttttagcggtcaaaaacaatacgctcagtccgcgcaccggcctgcggcagctcagtgaatttatccagacgcaatattttgattaaaggaatttttatgtcttatcagtatgttaacgttgtcactatcaacaaagtggcggtcattgagtttaactatggccgaaaacttaatgccttaagtaaagtctttattgatgatcttatgcaggcgttaagcgatctcaaccggccggaaattcgctgtatcattttgcgcgcaccgagtggatccaaagtcttctccgcaggtcacgatattcacgaactgccgtctggcggtcgcgatccgctctcctatgatgatccattgcgtcaaatcacccgcatgatccaaaaattcccgaaaccgatcattagcatggtggaaggtagtgtttggggtggcgcatttgaaatgatcatgagttccgatctgatcatcgccgccagtaccagtaccttcagtatgacgcctgtaaacctcggcgtcccgtataacctggtcggcattcacaacctgacccgcgacgcgggcttccacattgtcaaagagctgatttttaccgctagcccaatcaccgcccagcgcgcgctggctgtcggcatcctcaaccatgttgtggaagtggaagaactggaagatttcaccttacaaatggcgcaccacatctctgagaaagcgccgttagccattgccgttatcaaagaagagctgcgtgtactgggcgaagcacacaccatgaactccgatgaatttgaacgtattcaggggatgcgccgcgcggtgtatgacagcgaagattaccaggaagggatgaacgctttcctcgaaaaacgtaaacctaatttcgttggtcattaatccctgcgaacgaaggagtaaaaatggaaactcagtggacaaggatgaccgccaatgaagcggcagaaattatccagcataacgacatggtggcatttagcggctttaccccggcgggtagcccgaaagccctacccaccgcgattgcccgcagagctaacgaacagcatgaggccaaaaagccgtatcaaattcgccttctgacgggtgcgagtatcagcgccgccgctgacgatgtactttctgacgccgatgctgtttcctggcgtgcgccatatcaaacaagctccggtttacgtaaaaagatcaatcagggcgcggtgagtttcgttgacctgcatttgagcgaagtggcgcaaatggtcaattacggtttcttcggcgacattgatgttgccgtcattgaagcaagcgcactggcaccggatggtcgagtctggttaaccagcgggatcggtaatgcgccgacctggctgctgcgggcgaagaaagtgatcattgaactcaatcactatcacgatccgcgcgttgcagaactggcggatattgtgattcctggcgcgccaccgcggcgcaatagcgtgagcatcttccatgcaatggatcgcgtcggtacccgctatgtgcaaatcgatccgaaaaagattgtcgccgtcgtggaaaccaacttgcccgacgccggtaatatgctggataagcaaaatcccatgtgccagcagattgccgataacgtggtcacgttcttattgcaggaaatggcgcatgggcgtattccgccggaatttctgccgctgcaaagtggcgtgggcaatatcaataatgcggtaatggcgcgtctgggggaaaacccggtaattcctccgtttatgatgtatagcgaagtgctacaggaaagcgtggtgcatttactggaaaccggcaaaatcagcggggccagcgcctccagcctgacaatcagcgccgattccctgcgcaagatttacgacaatatggattactttgccagccgcattgtgttgcgtccgcaggagatttccaataacccggaaatcatccgtcgtctgggcgtcatcgctctgaacgtcggcctggagtttgatatttacgggcatgccaacagtacacacgtagccggggtcgatctgatgaacggcatcggcggcagcggtgattttgaacgcaacgcgtatctgagcatctttatggccccgagcattgctaaagaaggcaagatcagtaccgtcgtgccaatgtgcagccatgttgatcacagcgaacacagcgtcaaagtgatcatcaccgaacaagggatcgccgatctgcgcggtctttccccgcttcaacgcgcccgcactatcattgataattgtgcacatcctatgtatcgggattatctgcatcgctatctggaaaatgcgcctggcggacatattcaccacgatcttagccacgtcttcgacttacaccgtaatttaattgcaaccggcagcatgctgggttaatgactcgtcccgtcacgatcttcagcaatatgctgaagcatcgtggcggtataacgatgatttctgatactataaagatattcctgcatatacatcggcctgtgcggtgcatcaaaatatttcagcgttgccggattcaccagtcgccaggcaaaatgcgggatcaccgtcagaaaatgtccgcgctccacggcgctgattttggccataaaactgtagggacgataaataatggttggattgatcccacaaggtcgcatattcgcatcaatcattgcttcgaagttggcccggttctgaaagcgcatttgtagccagggcagctcctgaagcagctcttgctcttgtcgctcttcataacggcgagaaacgagaaagcctaatcgcagcggtggtagttcactgatagtcaggttttccagttcctgaactcgtgcagatacatgctgtggggagataataaaatctaactggcggtcaaaaagattatcgataacgccattttcgctgaactcaactggctgggcggtcacgccttcatacttatctccgagactaatcaactgatcgaaaataattgtcggataagtattatctatgccaatcacaatttctcgactacgacgcccactgttatggatttcattatcaatcgcagaaagccgttgataaaccgggaacagtttttgatacagttcctgtccggctttattgaggctgatattattatctttgcgggtaaatagcgtatagccaatttgttcttccagcgcggcaatgcttttaccaaatgggctagccgtcatatggattttttctgccgcccgggcaatattattggtttgcgctaataaaatgaaattgcgcatctttttgctaataaaaatgtccatccccctcccccgcatccttgtccgcttaaccgtttcagtcagcctatccttgatgaaaccgcgagcaaagataggtgattacgtcatggttttacagaaaattacagaaaaaggaggcaatatcgggtaaaggcattagcccgacgaatacgtcgggctacaaatattattgtgctgcaggtgttttagcgggttgttgatccacaggttctaactggaagaccacatcgacctgatcatcaaactgaatagcggcctgctcgtaagtttcctgggcggacaccggcgcggcatcggctttcatcatccgcaccattgggctgggctgatagttggaaacatggtagcgcacgctatataccggccccagtttacgatgaaagccgttcgccagttcctgcgcctgatgaatcgcgttatcaatcgctgccttacgcgctttgtctttataggcatccggctgcgccacgcccaggctcacagaacgaatttcgttaagacccgccttcagcgcgccatccagcaaggaattcagtttgtctaactgacggagcgtgacttccaccgttctcacagcgcggtagcctttaaggatacttttaccatcctgataatcataatctggctgggtgcgtaagttcgcactgctgatatcttttttcgcgatctgattgagttcaaggaaggaaatgtattgtgcgacgcgctcatctgcctgtttcttggcagtagcggcatccttcgcggccacgttaacttcaatcgcaagagtggcaatgtctggcaccgcatccacgcttgccgtaccggaggtgacaatatgcggtccatccggcaattcgttagcctgcgctgccatcccgctaatacccattaatgccgccagggcgataactttgaacttcacgttagtctctccgtgttaattgacttgcccaaaattcaggacctctggaggcaagcttagcgcctctgttttatttttccatcagatagcgcttaactgaacaaggcttgtgcatgagcaataccgtctctcgccagctgcaaggcaataaaccacataacacatcccacaaccagattgataatgcgctgtgcttttgccgtgcgcagacgcggtgccagccaggctgcgagaagagccagaccaaagaaccacaggaaagaggcgctaattgtcccgagtgcaaaccagcgttttggttccacatcaagttgcccgccaaggctgcccagtacaacaaaagtatccaggtaaacatgcggattcagccaggtcactgccaacatggtggcgataattttccatctgccttgcttcatgacttcggcgctggctaactcaatattactgctcattgctgttttaaaagcgccaaaaccataccacagcaagaaggctacgccgccccaggtgaccagcgccagcaaccacgggctctgcatcaataacgcgctgccaccaaaaatcccggcgcaaatcaggaccaaatcgctgatagcacaaagtaaggcaatcataatgtggtactgacgacgtatgccctgattcatcacaaaagcattttgtggaccgagcggtaggatcatagccgccccaagtgcaagaccttgaaagtaataagaaaacacgttggatattccgaattaagtatctgatgcagagactatatcgcgggattgttattagcggaaattgataatattaattggcaatcagaaaaactaataagagagaggccagagagtattatctggcctcagcgttgattacgcagctttgtcttctttcacccgcttaaagttcacatccatttgcgggtacgggaagctgataccggcggcatcaaattcacgtttaatacgctccagcacatcccagtacacgttttgcagatcgccgctgttgctccagacgcggaccacgaaattaatgctgcttgcaccaagttcgttcaggcgcacagtcatttcgcgatctttcaaaatgcgatcttcagactggataatattggtcaggatctgcttaacctgatcgatatcggaatcatacgccacgccaataataaattcgttacggcgaactggctcgcgggagaagttaataatatttccggcaataattttaccgttcggaataacgataattttaccgtctgcagtacgcatggtggtggagaaaatctgcacactcagcacagtaccggctacgccgcccaggtcaacatattctccggcacggaacgggcggaacatgacaagtaacacgccagcggccaggttagacagactcccctgcaaagccagaccaacagctaagcctgcggcaccgagtacagcaatgacactcgcggtttgtacacccacgcgtcccagtgcagcgattagcgtaaaggcgataataccgtaacggactaatgcagaaagaaaatcagcaacagtggcatcgattttacgggagatcatcaggcgattcaccgcgttggaaatcatccgcgcgataatcaaaccaacgatgatgatcgcgagtgccgccacgatgtttactgcataacttagcagcagcgcctggttagctaccagccagcttcccgcgccgtttatgctatcgacaacattcaaatcttccattcaatattccttttcaactgactcaaaatggagaaatacactccgccgccttatgacgggcagtctgacaagggtaaacaataaagcataattttgccaaatagatcacagatttctcatctgaatcaccttgcttttggcgaaaaaatccccgcagagcggggctcagacagatatcaatgtgcgctttgtcatgccggatgcggcgtgaacgccttatccggcctacaaaaacctgcaaattcaatatattgcaggatacgtgtaggcctgataagcgtagcgcatcaggcaattttgcttttggcgaaaaaaagacccgcagagcgggccttgagataagcagaaaggaatatcttacagaacgtcgatcgcgttcagttcctggaatgctttctccagacgagcgatcatgctagtctgaccggcacgcagccatacgcgcggatcgtagtatttcttgttcggctgatcttcgcctttcgggttacccagctgaccctgcagataagcttcgttcgctttgtagtagttcagaacgccttcccaggttgcccattgggtatcggtatcgatgttcatttttactacgccgtagcttacggagtctttgatttcctgagcagtagaaccggaaccaccgtggaatacgaagttcaggctgttgtgcggcaggttgtgtttcttggaaacatattcctgagaatcacgcaggatggtcggagtcagaaccacgttacccggcttgtaaacaccgtgtacgttaccgaaggacgctgcgatggtgaaacgcgggctgattttgctcagttcggtgtatgcgtaatcaacgtcttccggctgggtgtacagtgcagaagcgtccatgtggctgttgtccacgccgtcttcttcaccaccggtgcaacccagttcgatttccagagtcatgccgattttggacatgcgctccaggtatttagagcagatttcgatgttctcttgcagagattcttcagacaggtcgatcatgtgagaagagaacagcggcttaccggtagctgcgaagtgtttttcacccgcgtccaacagaccgtcgatccacggcagcagtttcttcgcgcagtggtcagtgtgcaggataaccggaacaccataatgttcagccatctggtgaacgtgatgcgcaccagagatcgcgcccaggatagcagcaccctgcggaacgtcagatttcacgcctttaccagcgataaaggaagcaccaccgttggagaactgaacgataaccggcgctttaactttagcagcggtttccagtacggcgttgatggagtcagtaccgacgcagtttactgctggcagtgcgaagttgttttcttttgctacctggaaaactttctgtacgtcatcaccagtgattacgccaggttttacgaaatcaaaaatcttagacatgtctcttgtcctgtatcgtcgggccttatactcgtcatacttcaagttgcatgtgctgcgtctgcgttcgctcaccccagtcacttacttatgtaagctcctggggattcactctcttgtcgccttcctgcaactcgaattatttagagtatgaaaaattgcgtgctctaaaagcgcgctgaaacaagggcaggtttccctgccctgtgattttttacttcttagcgcgctcttcgagcatcgctactgcaggcagtactttaccttccacgaattcgaggaatgcgccgccgccagtggagatgtaggagattttgtcagcaatgccgaacaggtcgattgctgccagagtgtcgccgccgccagcgatggagaacgcttcgctgtctgcgatagcgttagccacgatttcagtacctttgcggaagttcgggaattcgaacacgccaaccggaccgttccacagaatggttttcgcattcttcaggatttcagccagttcctgagcggaagcatcaccgatatccaggatctgctcgtcagctttcacatcgttaacagatttcagggtagccggtgcagtttcagagaactcggttgctacgcgaacatcagacggaaccgggatgttgcaggtggtcagcagacgtttagcttcgtcaaccaggtcagcttcgtacagggatttacccacatcgtggccttgtgccgcgataaaggtgttagcgataccaccaccaacaatcagctggtcagcgattttagacagggagtccagaacggtcagtttggtagatactttagaaccaccaacgatagccaccatcgggcgagcaggttctttcagtgctttacccagcgcgtccagttcagctgccagcagcgggcctgcgcacgcaacgtcagcgaatttaccgataccgtgagtagaagcctgcgcgcggtgagcagtaccgaatgcgtccattacgaacacgtcacacagtgcagcgtattttttggacagggtttcgtcgtctttcttctcgcctttgttgaagcgaacgttttccagaacaaccagttcaccttcagcaacgtcaacgccgtcgaggtaatctttaaccagacgaaccgggttagacagtttgtctttcaggtagttaacaaccggcagcagagagaattcttcgttgtactcgccttcggtaggacgacccaggtgggaagttaccatcacttttgcgccttgtttcagggccagttcgatggtcggcagagaagcacggatacgcgcgtcgctggttactttcccgtcttttactggtacgttcagatccgcacggataaatacacgtttcccagcaagatccagatcggtcatcttaattacagacatggtgaatcctctcgttgattctaaaagttttgcagacgctgcttgcgtcttacctgaaagcaacagtagccatagctaacgtcgtgtcgagcattcggttagcaaagccccattcgttatcgcaccagaccaacgttttgatcaggtgtgcgccactgacccgggtttgggtgccatcgacaatggcactgtgcggatcgtggttaaaatctacagagaccaacggcaattccgtatagtcaactataccatgaaatgcaccttgtgctgctttttgcagcaacaggttgacttcattggcttttacaggtttcttcaccgtcacgcttaaatcgattgccgtcacatttatggttggcacacgtaccgcaatcgcttcaaagcgatcgttaaattgcggaaaaaatcgtgtgataccggcggccagtttagtatcgaccggaatgatgctctggctggctgcccgggtgcgacgcaggtcaggatggtatgcatcaataacctgttgatcgtgcatggcggagtgaattgtggtcacagtgccggactcaataccgtacgcatcatctaacaatttgatgacgggaattatgcaattcgtggtacaggaagcgttagaaacgatgcggtgttccgcacgaagttgatcctgattgacgccgtaaacaacggtcgcgtcgagatcgttactgccaggatgactaaagagcacttttttggccccggcggcaatatgcgcttcgccatgctcgcgggagccatatacgccggtgcagtcgaggactacatcaacgccaagttcacgccaggggaggctttgcagactacgttcatgcaatacgcggatggcgtcatcaccaacaaaaagttgatcgcgttcctgtcgtacttcccatgcaaaacggccatggctggtgtcatatttcaacaaatgcgccatgcccgcagcatccgccagttcgttgattgccaccacggtaatttccgcccggcgtccggattcatacaaagcacgaaccacattacgcccgatgcgaccgaagccatttatcgctacgcgtacggtcatagatctcctgcaaggttttccctgagcaaatttgccagacagagtaatccagcaaatcgtccggggaaaccttacctgtcgcaaactgcgactgattggttaattgtcgaacatttaatcgactgaaacgcttcagctaggataagcgaaacgtggaataaaaggaatgtttgtccagccgaagaagacatttatctgactcacatcacacttttatccccttttgtgggaagctttattccaggctggcgtaataataaccctacaataactggaataaattgtcagcttgtgaagtgataccggccttcttcagtcatctctactatcagattggcctgacggctattcatcagcacacgctcgacattggggccatcggtgcgggcataaaatgcttcggctacttgccgcgttaatcctcccgcaattttacgactaatcaagcgctcccgcagaatttgagcaggtgcatgaataaaaatagaaaaatcgcagaaagatgccaactccagccacttttcatcatccagtaacaaccagtttccttcgacgatgacgagtggtgcggtaacgtgcaacgcatcttcaacaggatcatgcttttgtcgatcgtactgcggccacgtacaatccccttccacgacctggcgcagattttccgtcagtttcgcaacgtcaaatgtctctggtgcgcctttgaaggggcgcaattgatgcgcatccagccagctattgtaatggtgaaaaccatccatcgggagcgtctgaatagcgggcagttccgggtcttgttgcgcgagatattcccagaaggtggttagggtacttttacccgtccccggcggagcgcaaagaaaaaccaccgtacgccgctgcggatttaccgtctgtaaggccgccaacatgtgcagcaacggtttatgtacattttcaatctcttcgttctggtactgtgcctgtatcttcagcccattcaccgttaattcaattttcacggcgttaattcctttaaggtggtcgttactgccagcgtcagcgccgttttgaccattccgctaaaacgcgcctcactccagacggagaaatcagcgaacttcatcgcttttaacgcgtcatagagcatcgcattgcgggttatgctattgacgttgctgataaaatcccaggtcatgtcatcggcaaatccgggcgtttcatcctgttcgttcaggtaatgccagaactgggaaaaatgcgtgatatcggcgtacaaccatttatccattttcccaacgcataaatcaaacgcagtgcaacatcaatatcgtcaagcgggccgctttgggcgagtaacggcttcactgcatattccacgatctcttcatcgttatcgacaaacaggctcggcagaaactggcgtatcccctggagcaaaatggtatgcgcagttttcataaaactaaataaattgtcctgtgcatccagttgctcaagcacatcatcttctgtcagcgtcgccattggtcttccgatagatcaccatcaatgcagggagtctattatattacacgtttggtccgcgccgccgatcagtaatgtctgcgtccgcaccccattcgccgtctgttggataccgttcaccagctcaccgcccgtcacgcccgtagcgctaaagaggatatcgttccccctcaccagttcatcgaggctgtacacacggttaacgtcaacgcccattgccttgcaacgcttgcgctcctgctctgcaatctgccgattttccgtgtaatcccctttagcctggcaaaagtcaatcagctcggcctgcatatccccgcctaatgctttaacggcacaggcagaaatcacgccttctggcgcaccgccgatggtgtacatcacatcgtaaggattatcctgccagcaggtcagcacgctggcggcgacatcgccatccggcagggcaaaaaccttcacgcccagctgtgttgcttcctcaatcgcggcactcaggcgcggtttatccagcgtaaccatgcgcagcttatccagcggtttgcctaacgctttcgccacgttgcgcaggttgtccgtcagaggcaaagacagatcaatcgcgcccgccgccagccgattaacaaccagctttttcatatacatatcgggcgcatgtaacaggctatctcgaggggcgaaagccatgaccgccagcgcattgctctgccccatcgccaccatccgcgtgccttcaatgggatcaaccgcgatatcgacttctggcccatcgcctttgcccacctcttcgccaatccacagcatcggcgcatggtcaatttctccttcgccgataaccactcgtccacgaaaagcgacgtcgtttaatgcctggcgcatcgcggtgaccgccaggccatcaattttatttttgtcgccacatccggtttgcggccaggcagccaacgctgcctgttccgtaacgcgaaataatggccacgccagggacatcattgcgcggcctccccgatatcaacgccaaattgtgccagcagatatttctcggcctgttcattccagatgccgtgcgtttcctcaaccagccgcgccaactctttaaacagcggatcggttttgcctttttcggcaaaatcggcaatggcagtgagcggcatggtcacgccgttataaatgagttttttaccgccagggatatccggcagattgagcacggtttctggcaccgcatccaggccaccgatatgggtcaccataaagctcggctgtaactgcccagtggcgctaagggcaatcgcctctttcatgtcgtccgtactaccgccagatgtaccgacgacgtgcgtgctgttgtaatggacgttgtagaaattaaacggcactttgaagtttttatccgtcggcccggcaaagaagttcagacagccatcttccgccagtaattcatcagccatctcaacgacagcaggcaccgccgcataaacaaaaatgtcatcgaacccggcatctcctgtcagcgcccgcagcatctggacaggatcgctcatccctttggtattcacatacaccagctcaatgcctttactggccgccagttccaccggcagcagcttctgtacctgcgccagacgtttgtcgtcgatatcgaccaccaccacccggctcggttgtatgccgccgttaatggcgtaatcgatagcgccaatgcccatcggacctgcacacgccagcagtgcaatattgccgccaggtttgacgcccatgcgatgctcataaacatattgcgtggtgtgataattggcatgataagcaccaataatgcagcacataggctctgccaggctcgccgcagcaaaataagagccgtgatacggtaatacgcagcccaaattaatggcgatttcgggaataatcatataagtggcattgccgccaaaatattcgtagctgtagcccgcactatatccgcttggtaaccccatcgccggttgcaatacaaaacgctggccttttttatatttgccagtgagatttttacccacttcgacaataaccccggcacattcatgcccggtaatgaccggatgattttctaaatcgtcgggtacgcgtttatgttcactaccgagtaacgccgctttccaggtgcttaaacagacgctgtcagaaattacactcaccagtaattcattatcggtaatttctggcagttcaaatacgcgcagacggacatcccgcttgccataaatagcagcaactttggttttcatttttacctctgtaatcagtgtttatgttcggcggttaattgattaaataaagtgtcgagttttggatcgccaatatagttattaatcaatatcagtggtttatccgtcacacgtttcacgcgcccttccagactggcatgagtaacgacgatatccgcatccgcaggcacgttttctatggcgtaatgttttacttcaattgccagccccgctttttccaggcgtttacggaaggtggtcgcgcccatcgcactggagcccatccccgcatcgcaaacaaaggcgatacgcttaaccctgcttaagctgaatgcaccctcttgtttcatcgccttaaccgcattggcactctgagcaaactcatcttcgctctccgtttccaccgttttttccatcttcagtatcaggctagtaatagcaaaggacaccagggtacctaccgtaacaccggcaattgtcgccaggaagctgcctttcggcgtcagtgccaggtaagcaaagatagaccccggacttgggccagccaccagaccaccgtccagtaagttaaacatccaggtgccagacataccgcccgcaatcatggcaataatggtcagcggcttcatcagcacatacgggaaatacagttcgtggatcccaccgaggaagtgaataatcatcgccccgggcgcagaacgtttactcatccctttaccaaacaaggtaaacgccagcagcagccccaggcccggacctgggttagaggccaccataaagaagatggatttaccgttaacgctagcctgttgcattcccagcggataatagacgccctgatcgatcgcattattgaggaaaagcactttcgccggttcattgatgacactcaacaatggcagataacccgcatgtaccagcgcctcaatacactctttgacgaaagtattggcaattaacaccgccgggccgataacttcaaaacccagcagacaaaggagcatccccgcgatacctaaactgaagttattgataaccatctcaaaaccggcaggtatgcgtttttccagtgccttatcgacatattttatgaccaacccaccgagcggccccatgatcatactgccaaggaacatcgggatctctgcgccaacgatcacaccaatagtacctattccgcccatgaccgccccgcgtttaccgccgaccagatgaccacctgtagaaccaatcatcacgggcaataaataggtaatcatcgggccgacaattttggcgaaatgttcgttaggcagccaaccggtgggaataaataacgcagtaataaaaccccaggcaataaaagcaccaatattggggatgaccattgcagtcaaaaagcccccaaaagcctggacctttgcacgagcagacttgttttccataatattatcctgtagaggagagagtaattatccgcggctgataatgtccgctaattgtttttcactacttgctgttaagagttgttcgagtatttcttcttcgcacagtaattcacttaacgcctgaatagcgccaatgtggctatcggcatcggcagcagagagtccgatgagtaatttaattggttcgtcattccccggaaaataaacaccttgttcaagtaatgtcaaagacatcccggttttaagcgccccacattccggtcgcgcatgaggcattgccacgcctggtgcgagaatataataagggccattgttaatggtggaatctttaattgcctgaatgtaattctcgctgatatagtttttatccagcaaacttaccatgctgaaatcgatagcttcctgccaatcttttgcactatgtataacactgatactactttctggaaaataatcactaagccgcataaattatccttattttatttttagggtaccgtccggcggtaaaaataaaatactcgtgcggtttaatgaaagcaattgagcagggaaaccggtgttttgaaaacagtgaattattaatttcttatataacattgagttatagatataacaacaaatgtcaatacgcatatcgtgatgcatattacataattgatatttattgcatataaatatttgtgatctacaacacgccttatctattgcttgtccgcaaacggacatatcaaggtaataaaaaaggtcgccgaagcgacctttttacccgaaatgctaattacagcagttcttttgctttcgcaacaacgttatcaacagtgaagccgaactcttcaaacagcagctctgccggagcagattcaccgaaggtggtcataccgacgatagcaccgttcaggccaacatacttgtaccagtagtcagcaatacccgcttctacagcaacgcgtgcagtaaccgctttcggcagtacggattcacggtaagcagcatcctgcttgtcaaatgcgtcggtagacggcatggacaccacgcgcgctttcacgccttcggcagtcagtttttcgtaggcagcaacagccagttcaacttcactaccggtagcgatgaaaatcagttccggctgaccggcgcagtctttcagcacataaccaccgcgcgcgatgtttgccagttgctcttcagttcgttcctgctgcgccaggttctgacgggagaggatcagtgcggtcgggccgtcctgacgctcaacaccgtatttccacgcgaccgcggattcaacctggtcacacggacgccatgtagacatgttcggggttacgcgcagagaagcgacctgctcaaccggctggtgagtcgggccgtcttcgcccagaccgatggagtcgtgggtgtaaaccatcacctgacgctgtctcatcagcgcagccatacgtacggcgttacgtgcgtattccacgaacatcaggaaggtggaggtgtacggcaggaagccaccgtgcagggagataccgttagcaatcgcggtcataccgaactcgcgaacaccgtagtggatgtagttacccgcagcatcttcgttgattgctttagaaccagaccacagggtcaggttagacggcgccaggtcagcagaaccgccgaggaattccggcaacagcggaccgaacgcttcgatagcattctgagacgctttacggctggcgattttcgccggattagcctgcagtttagcgatgaactctttcgctttagcgtcgaagtcagacggcatttcgcctttcatacggcgggtaaattcagcggcttcctgcggataagctttcgcgtaagcagcgaatttctcgttccatgcggattctttcgcctggcctgcttctttcgcatcccactgagcatagatttcagacgggatttcgaacggcgcatatttccagcccagttgttcgcgggtcagggcaatttcagcgtcgcccagcggcgcaccgtgggagtcgtgggtaccggctttgttcggggaaccgaaaccgatgatggttttgcacatcagcagggaaggtttgtcagtcactgcgcgcgcttcttctactgcgcgtttgatagatgccgcgtcatgaccgtcgatgtcgcgaataacgtgccagccgtaagcttcgaaacgcattgcggtgtcgtcggtgaaccagccttcaacgtgaccatcgatagaaataccgttgtcatcgtagaatgcaatcagtttacccagcttcagcgtacccgccagagagcaaacttcgtgggagatgccttccatcatgcagccgtcgcccatgaaggcgtaggtgtagtggtcgacaatgtcgtggcccggacggttaaactgcgccgccagcgttttttctgcaatcgccataccgactgcgttggcaataccctgacccagcggaccggtggtggtttccacaccagcggtgtaacccacttccgggtgacccggagttttagagtgcagctgacggaagtttttcagttcttccatcggcagatcgtaaccggtgaggtgcagcaggctgtagatcagcatggagccgtggccgttggacagcacgaagcggtcacggtcagcccaggacggattctgcgggttgtgtttcaggaaatcacgccacaggacttcggcaatgtcagccatacccataggggcacccgggtgaccggatttggctttctgtactgcgtccatgctcagcgcacgaatagcattggcaagctctttacgactggacattttgactccagatcggatgatgaagggcacgcccttaacgacttgacgacagcgcgttttgggctacgccggaaaatttgccaacaatttaccacaagccgcgcgtcatgtacatggaacatccttttgccgcttcagaaatctctggatcatgctcgcatgttgcgcaatctactcgcccgtccgctgcgcttttccttatactgagactgagcgtcgattcacctgcaaacggcgcatttttagaataatcctgaccttgtgcggaagagaaaacatgaaaattcgcgccttattggtagcaatgagcgtggcaacggtactgactggttgccagaatatggactccaacggactgctcagtagtggagcggaagcttttcaggcttacagtttgagtgatgcgcaggtgaaaaccctgagcgatcaggcatgtcaggagatggacagcaaggcgacgattgcgccagccaatagcgaatacgctaaacgtctgacaactattgccaatgcgctaggcaacaatatcaacggtcagccggtaaattacaaagtgtatatggcgaaggatgtgaacgcctttgcaatggctaacggctgtatccgcgtctatagcgggctgatggatatgatgacggataacgaagtcgaagcggtgatcggtcacgaaatggggcacgtggcgttaggccatgtgaaaaaaggaatgcaggtggcacttggtacaaatgccgtgcgagtagctgcggcctctgcgggcgggattgtcggaagtttatctcaaagtcaacttggtaatctgggcgagaaattagtcaatagccaattctcccagcgccaggaagcagaagccgatgattattcttacgatcttctgcgccaacgcggcatcagcccggcaggtcttgccaccagctttgaaaaactggcaaaactggaagaaggtcgccaaagcagtatgtttgacgaccatcctgcatccgccgaacgcgcccagcatattcgcgatcgcatgagcgcggatgggattaagtaaagcctggtggtgtcgaacgtaggtcagataaggcgttcacgccgcatctgacatgaatggcacatttgttaccttgtgcgcattgccggatgcgatgctggcgcatcttatccggcctacgggtgccgaacgtaggtcggataaggcgttcacgccgcatccgacattaatggcacgttttacccgtgcgcatcgcatctggtgcttactcgccctttttcgccgcctgaatatacagcatttccagcgccagcgttgccgctgccagagcagtgatttcgctctgatcgtatgccggagccacttccactacgtccatcccaacaatgttgagatctttcaggccgcgtaccagtttaatagcgcgatcggaggtcaggccgccaatcactggcgtaccggtgcctggtgcaaaagcaggatccaggcagtcgatatcaaaagtcaggtaaaccggcatatcacccacaatctgtttcacttgggcgataacgtcatccacgctgcgatcgttcacctggcaggcgtccagcacggtaaagccgttgtctttatcaaactcggtacgaataccaatctgcacggaatgattcgggtcgatcagaccttctttcggcgcggtatagaacatagtgccgtggtcaaattcacaaccgttcgcataggtatcggtgtgggcgtcaaagtgtaccagcgccattttgccgaaatgcttcgcatgagcacgcagcagcggcagcgtaacaaagtggtcaccaccgaaagagagcatacgcttaccggcagccagcagcttctcggcgtgcgcctgcagcttttcgctcatctcacgggcatcgccaaaggcatataccagatcgccgcagtccacgacgttcagacgctcacgcatgtcgaaattccacgggaagcggttgtgttcccaggccagattcgtgctaacctgacggatcgctgccggaccgtggcgaccacccgcacgaccagaagtggccatatcgaacggcacgccagtaatcacccagtctgcatcgctgtcatacggctggaagttcatcggcaggcgtaaaaaaccaaaggcattggaaaccagactgttatcgtattgatgacctaaggtgctcatggatggactcctattacaaagtcgatataaaaaaacccttccgcgtcgttaggcccgacgaggaagggttggatttgtcacaataaattgtggcggattatcaccgctaaattaagcggattcaagtaacacaggacttactcatcttcaagataagtataaccgtacaaacctgcctcgaactcttcaaggaactgttgttgcagttcagcatcaagatcggttttcttcacttgatcgcggaactgggttaacagcgttttcggatcgagctgtacatattgcagcatgtccgccacggtatcgccttcgtcagacagttctacttctacgctaccgtcagggaagacgaacacgtcaaccgcttcggtatcaccgaacaggttgtgcatgttgccgaggatctcctgatatgcgccgaccataaagaaaccgagcatcggcggattctctggatcgtactccggcattggcattgtcgtggcaataccgtcaccatcaatatagtggtcgatagcaccgtcagagtcacaggtaatatccagcagcacagcgcgacgttccggcacttgatccagcccttccagcggcagaaccgggaacaactggtcgatcccccatgcgtccggcatgctctggaacaggctgaagttgacgtacattttgtccgccatacgttcctgcagctcgtcgataatcggacgatgagcacggttttgcggatccagctgcttttgcacttcatggcacatgctcaaataaagctgctcagcccatgcacgttcttgcaggctaaagatgccggaagagtagccgatatgaatgtcgtgcagatccatctgactgtcgtgtaaccattcacgcagagaacggcgagttcccggttcgtgcatctcctgccaggtttcccacatgctttgcagcgcgcgcggcgcatcttctgcaggcgcggtcggcaccgtgtattcgttacgttccacgccgatgatattagacaccagcacggtgtgatgcgcagtcaccgcacgaccgctttcggtgattaccgtcggatgcggcagaccgttttcttcacacgcatcgccaatcgcccagataatgttgttggcgtattcattgaggccgtagttcacgctacagtcggactggctacgagtaccttcataatccacgcccagaccgccgccgacgtcgaagcactgaatattgacgcccagcttgtgcagttccacatagaaacgcgcggattcacgaacgcctgtcgcgatatcgcgaatattcgccatctggctaccgaggtggaagtgcagtagttgcaggctgtcgagacgcccggcttcacgcagggtttcaaccagttgcagtacctgagtcgcagccaggccgaacttgcttttttccccgccggaggactgccatttaccgctaccctggctagccagacgtgcacgcacgcccagacgaggaacgacattcagacgttctgcttcatccagcacaatggcgatttcactcatcttctcaatgaccagatagaccttgtgccccatcttctcgccaattaatgccaggcggatatattcgcggtctttataaccgttgcagacgatgacgctacgggtcatgccagcatgtgccagtactgccatcaactcggctttggaaccggcttccagacccagcggttcgccgctatgaatcagggactcaatcacgcggcggtgctggttaactttgatcggataaacaaggaagtaatcgccgttatagccgtaggattccctcgcacgtttgaacgcggcgttaatggaacgcaaacggtgctgcaggatctgtgggaaacagaacagtgcaggcagacgctggccctgtgcttcacgagttttcactaactgcgcgagatcgacgcgagcttccgggacgtccgggtccgggcacacgctaatgtggcccagctcgttaacgtcatagtagttattgccccaccaggcaatattgtaagtacgcagcatcttgctggcttcctgggagctcattgcaacctcctgcatggagcgtagtacaccgtgttcgcccgcactgctaggcaaacccatagacatgtcgtcagacatagcgaacctcaaattattttattaagtgtaaaacagttaacgactatcgcagcctggaactggcttaacaacccataagcacatggattttccagcagactatgctgacgctccaactgcgcaaccggtttctttttcataacattattaagcacataaccgaacgtaagtgtgaaagttcggcgaaaccacgagaaaactcttgtttttacaagagcgcccttgttcagtcctcagtaactgtaaccagctcttgaatcctgagaagcgccgagatgggtataacaagcgcaggtatgcaaagcagagatgcagagtgcggggaacgaatcttcaccagaacggtgagacaggttaagcagcagacaacggttcattatttcgtaagtcctccacggccgcctgttaagacgaacccacaagccaaaactctgattagtacccggctggaagtggcaacacgaaagaaacgtcgtgtgctttttatttaagccgcgcgccgcgttttataccccacaatggcagaaaattgcaaaagataaatacgcagaatgccggcattgtcaggaaaaatttccagccacgtttttaacagaatgagacagctttcaaaaaaaagtggaaatagggtgaagaattgacctaaaatagccatccagatgttaatccatccataccgattaacactcagactgccagtgtttttaacctgcagagtcgtggtaggatccgctaccacagaaaatccacacaacagtttgagctaaccaaattctctttaggtgatattaaatatggcaaaacacctttttacgtccgagtccgtctctgaagggcatcctgacaaaattgctgaccaaatttctgatgccgttttagacgcgatcctcgaacaggatccgaaagcacgcgttgcttgcgaaacctacgtaaaaaccggcatggttttagttggcggcgaaatcaccaccagcgcctgggtagacatcgaagagatcacccgtaacaccgttcgcgaaattggctatgtgcattccgacatgggctttgacgctaactcctgtgcggttctgagcgctatcggcaaacagtctcctgacatcaaccagggcgttgaccgtgccgatccgctggaacagggcgcgggtgaccagggtctgatgtttggctacgcaactaatgaaaccgacgtgctgatgccagcacctatcacctatgcacaccgtctggtacagcgtcaggctgaagtgcgtaaaaacggcactctgccgtggctgcgcccggacgcgaaaagccaggtgacttttcagtatgacgacggcaaaatcgttggtatcgatgctgtcgtgctttccactcagcactctgaagagatcgaccagaaaagcctgcaagaagcggtaatggaagagatcatcaagccaattctgcccgctgaatggctgacttctgccaccaaattcttcatcaacccgaccggtcgtttcgttatcggtggcccaatgggtgactgcggtctgactggtcgtaaaattatcgttgatacctacggcggcatggcgcgtcacggtggcggtgcattctctggtaaagatccaagtaaagtggaccgttccgcagcctacgcagcacgttatgtcgcgaaaaacatcgttgctgctggcctggccgatcgttgtgaaattcaggtttcctacgcaatcggcgtggctgaaccgacctccatcatggtagaaactttcggtactgagaaagtgccttctgaacaactgaccctgctggtacgtgagttcttcgacctgcgcccatacggtctgattcagatgctggatctgctgcacccgatctacaaagaaaccgcagcatacggtcactttggtcgtgaacatttcccgtgggaaaaaaccgacaaagcgcagctgctgcgcgatgctgccggtctgaagtaatctttcttcacctgcgttcaaaggccagcctcgcgctggcctttttcttttggataggcgttcacgccgcatccggcaaaaaaaccgcccgcacaataacatcattcttcctgatcacgtttcaccgcagattatcatcacaactgaaaccgattacaccaaccacaacagacaaagatttgtaatattttcatattattattcggttttcacagttgttacatttcttttcagtaaagtcttaattgcagataacagcgtttaatctatgatgatataactcaattattttcatgcacttaaatcataactaagataaatgttagtgtaagcgattacactgatgtgatttgcttcacatctttttacgtcgtactcacctatcttaattcacaataaaaaataaccatattggagggcatcatgcctgacgctaaaaaacaggggcggagtaacaaggcaatgacgtttttcgtctgcttccttgccgctctggcgggattactctttggcctggatatcggtgtaattgctggcgcactgccgtttattgcagatgaattccagattactagccacacgcaagaatgggtcgtaagctccatgatgttcggtgcggcagtcggtgcggtgggcagcggctggctctcctttaaactcgggcgcaaaaagagcctgatgatcggcgcaattttgtttgttgccggtagcctgttctctgcggctgcgccaaacgttgaagtactgattctttcccgcgttctactggggctggcggtgggtgtggcctcttataccgcaccgctgtacctctctgaaattgcgccggaaaaaattcgtggcagtatgatcagcatgtatcagttgatgatcactatcgggatcctcggtgcttatctttctgataccgccttcagctacaccggtgcatggcgctggatgctgggtgtgattatcatcccggcaattttgctgctgattggtgtcttcttcctgccagacagcccacgttggtttgccgccaaacgccgttttgttgatgccgaacgcgtgctgctacgcctgcgtgacaccagcgcggaagcgaaacgcgaactggatgaaatccgtgaaagtttgcaggttaaacagagtggctgggcgctgtttaaagagaacagcaacttccgccgcgcggtgttccttggcgtactgttgcaggtaatgcagcaattcaccgggatgaacgtcatcatgtattacgcgccgaaaatcttcgaactggcgggttataccaacactaccgagcaaatgtgggggaccgtgattgtcggcctgaccaacgtacttgccacctttatcgcaatcggccttgttgaccgctggggacgtaaaccaacgctaacgctgggcttcctggtgatggctgctggcatgggcgtactcggtacaatgatgcatatcggtattcactctccgagcgcgcagtatttcgccatcgccatgctgctgatgtttattgtcggttttgccatgagtgccggtccgctgatttgggtactgtgctccgaaattcagccgctgaaaggccgcgattttggcatcacctgctccactgccaccaactggattgccaacatgatcgttggcgcaacgttcctgaccatgctcaacacgctgggtaacgccaacaccttctgggtgtatgcggctctgaacgtactgtttatcctgctgacattgtggctggtaccggaaaccaaacacgttagcctggaacatattgaacgtaatctgatgaaaggtcgtaaactgcgcgaaataggcgctcacgattaatctccccaagcttcctcccatcgcggaggaagccacctcttgcagtcatcttttcttcgctctatcctctgccgctatgaaaacatcccgtctccctatcgccatccaacaggccgttatgcgtcgcctgcgggaaaaactcgcccaggccaacctgaagctagggcgtaactacccggagccaaaactctcttacacccagcgcggaacctccgccggaacggcctggctggaaagctatgaaattcgcctcaatcccgttttgctgttggaaaacagtgaagcttttattgaagaagtggtaccgcacgaactggcacatttgctggtatggaaacatttcggccgcgtagcgccacatggcaaagagtggaagtggatgatggaaaacgtgctgggtgttcccgcccgtcgtacgcatcagttcgaactgcaatccgtgcgtcgcaacaccttcccctaccgctgcaagtgccaggagcatcagcttaccgtacgccgccataatcgcgtagttcgtggcgaggccgtctatcgctgtgttcactgcggtgaacagctggttgcgaaataaccatctgaactatcaggaactttcctgatttggctgattgcataccaaaacagctttcgctacgttgctggctcgttttaacacggagaagtgcctacactagcgggattctttttgttaacccctaccccacgcgtacaaccgcgtggggagacgacgcggatttttaactatgcgtatcccccgcatttatcatcctgaaccactgaccagccattctcacatcgcgctttgcgaagatgccgccaaccatatcgggcgcgtactgcgcatggggccggggcaggcgttgcaattgtttgacggtagcaaccaggtctttgacgccgaaattaccagcgccggcaaaaaaagcgtggaagtgaaggtgctggaaggccagatcgacgatcgcgaatctccgctgcatattcacctcggtcaggtgatgagccgtggtgaaaaaatggaatttactatccagaaaagcatcgaactcggtgtaagcctcattacgccacttttttctgagcgctgcggcgttaaactggatagtgaacgtctgaacaagaagcttcagcagtggcagaagattgcaattgctgcctgtgagcagtgtggtcgtaaccgggtgccggaaatccgtccagcgatggatctggaagcctggtgtgcagagcaggatgaaggactgaaactgaatcttcacccgcgcgccagtaacagcatcaatacgttgccgttaccggttgaacgcgtccgcctgctgattggcccggaaggcggtttaagcgcagatgaaattgccatgactgcccgctatcaatttactgatatcctgttgggacctcgcgttttgcgtacagagacaactgcgctcaccgccattaccgcgctacaagtacgatttggcgatttgggctaacggagaagaataatgatcaagctcggcatcgtgatggaccccatcgcaaacatcaacatcaagaaagattccagttttgctatgttgctggaagcacagcgtcgtggttacgaacttcactatatggagatgggcgatctgtatctgatcaatggtgaagcccgcgcccatacccgcacgctgaacgtgaagcagaactacgaagagtggtttagcttcgtcggtgaacaggatctgccgctggccgatctcgatgtgatcctgatgcgtaaagacccgccgtttgataccgagtttatctacgcgacctatattctggaacgtgccgaagagaaagggacgctgatcgttaacaagccgcagagcctgcgcgactgtaacgagaaactgtttaccgcctggttctctgacttaacgccagaaacgctggttacgcgcaataaagcgcagctaaaagcgttctgggagaaacacagcgacatcattcttaagccgctggacggtatgggcggcgcgagcattttccgcgtgaaagaaggcgatccaaacctcggcgtgattgccgaaaccctgactgagcatggcactcgctactgcatggcgcaaaattacctgccagccattaaagatggcgacaaacgcgtgctggtggtggatggcgagccggtaccgtactgcctggcgcgtattccgcaggggggcgaaacccgtggcaatctggctgccggtggtcgcggtgaacctcgtccgctgacggaaagtgactggaaaatcgcccgtcagatcgggccgacgctgaaagaaaaagggctgatttttgttggtctggatatcatcggcgaccgtctgactgaaattaacgtcaccagcccaacctgtattcgtgagattgaagcagagtttccggtgagcatcaccggaatgttaatggatgccatcgaagcacgtttacagcagcagtaacccaccttagcgagaaggatctcgttgagactctgagtgacagcgcccttctttccacgcatactgggcgctgttgcttttttgaaccaggaaacagaacctctgacaatgaatttacagcatcactttcttattgccatgcctgctctccaggatccgattttccgtcgttccgtggtctacatttgcgaacataataccaatggtgcaatggggatcatcgtcaacaagccgctggaaaatctcaaaattgaagggattctggaaaagctgaagatcacgccggagccgcgtgatgaaagtatccgtctggataaaccggttatgctcggcggtccgctggctgaagatcgcgggtttattttgcatactccgccctccaattttgcttccagcattcgcattagtgacaacacggtaatgaccacttcccgcgatgtgctggaaacgctcggcaccgataaacaaccgtctgacgtattggtggctctgggttatgcctcctgggagaaaggtcaactggaacaagaaattctcgataacgcgtggctaacggccccggcagatctgaatattctgttcaaaacgccgattgccgaccgctggcgcgaggcggcaaaactgattggtgtggatattctcaccatgcctggtgtggcaggacacgcctgatgagtggaaccttactcgccttcgacttcggcaccaaaagcattggcgtagcggtcggccaacgcattaccggcaccgctcgccctttgcctgcaattaaagcacaggacggtacgccggactggaacattatcgagcgtttactgaaagagtggcagccggacgaaatcatcgtcggtttgccgctgaatatggacggcaccgagcaaccattgactgccagagcgcgtaaatttgccaaccgtattcatggccgtttcggtgttgaagtaaagctccatgacgagcgtcttagcactgtggaagcccgttccggtctgtttgaacagggcggctatcgggcgctcaacaaaggcaaagttgactctgcctctgcggttattattctcgaaagctatttcgagcagggatattaaggcgatttaaacgcctggcggagtgtaaataatatcatcgcgtcttattgccggatgcggcgtgaacaccttatccagcacacatctggcagcggctataggtctgataagacgcgttagcgtcgcatcagacatttattgcctttgtaggcccgataagcttgcgcatcgggcatggcaacgtcacaaacgcccttcccccacccggtgctgataactctgctgaaacgttatcatccccacctgctgcccggtttgaataacatgcggtaactggtgggttttcccttcgcgaatcaaattccccaccgcgggtgtgttaatcagcaattcaaatagcgccacgcgtccttcctgtttatccacttccagcttttgactcagcactgcccgtaaactacctgccagttgattacgcacggggtctttttcctgcgccggaaaactatccaccagtcgctcaactgcctgcgcggcaccacgcgtatgtaatgttgccagcaccaaatgcccggtttctgccgccgtcagtgccagacggattgtctcgctgtcacgcagctctccgagcaaaatcacatcaggatcttcccgcaatgcggcccgcaatccgcttgcgaacgtcatacagtgcaaaccaatttcccgctgctggatcaaacatcgctggctggcatagagatattcaacaggatcttccagcgtcagaatatgcgcatcggcatgttgattgagatagccaaccatcgccgccagcgtggtagatttgccactccccgtcgcccccgtcaccagaatcaggccattctcgctcttgagtaattccggcaataccgttggtgcgccaagctgttcgagctgcgggcagtggctaggtaacagccgtaacgccaggctaatgccatgccgttgcgcgaatgcgctgccacgcaatcgctggttttccgccaggctcacggcaaaatccagctgaccattctccagcaatattgcccgctgatcgtcatccagccactcccgcagtagctcttcgacgtccggcgtatcaaacggcgcagcttccattctgccgcgaatgcgccatcgtgcgggccaggcgctgcacaggtgtagatcgctgacgttatgctttacactaagggccacaatttcttccatattcatactaagatcctcggaaaatgaacgatattgcgcataacctggcacaggtccgggacaaaatcagtgcggctgcaacgcgttgcggccgttctccagaagaaattacgctgcttgcagtcagtaaaacaaaacctgcgagcgccatcgcagaagccattgatgccgggcagcgtcaatttggtgaaaactacgttcaggaaggggtagataaaattcgccactttcaggaactgggcgtaacaggattagaatggcattttattggcccgttgcagtctaataaaagccgcctggtggcagagcatttcgactggtgtcataccatcgaccgtttgcgcatcgctacccgtctcaacgaccagcgcccggcagaacttccccctcttaacgttctgattcaaattaacattagtgatgaaaacagtaagtccgggattcaactggctgaactggacgagctggcagctgcggtcgctgaactaccgcgtttacgtctgcgcgggttgatggcaatccctgcgcctgagagtgaatatgtaaggcagtttgaagttgcacgccaaatggctgtagcatttgccggactgaaaacgcgctacccgcatatcgacacgctctctctgggaatgagcgacgatatggaagccgccattgcggcaggtagcacgatggttcgtatcggcactgcaatttttggtgcgcgtgattactctaaaaaataaggaattaaaggaacgccatgaatacgttgactttcctgcttagtacggtcattgagctgtataccatggtgctgttattacgcatctggatgcagtgggctcattgtgatttttacaaccccttcagtcagtttgtagtgaaggtaacgcagccaattatcgggccactgcgccgcgttattccggcaatggggccaattgacagcgccagcctgctggttgcctatattctcagttttatcaaagccatcgtgctgtttaaagtggtgaccttcctgccaatcatctggattgccggtttactgattctgctgaaaaccatcggcctgctgattttctgggtcctgctggtgatggcgattatgagctgggtaagccaggggcgtagcccgattgaatacgtgctgattcagctggccgatccgctgctgcgcccgattcgccgcctgctaccggcaatgggtgggattgatttcagcccgatgatcctcgttctgctgctgtatgtcatcaatatgggtgtcgcagaagtattacaggcaaccggaaatatgctgctgccagggctgtggatggcgttatgaatgccgtaacagttaatgatgacggtctggttttacggctctatattcagccgaaagccagccgtgattctattgtcggtttacatggcgacgaagttaaagtcgccattaccgcgccgccggttgacggccaggccaacagtcatctggtgaagtttctcggtaagcaattccgggttgccaaaagccaggtggtgattgaaaaaggcgaacttggccgccacaaacaaattaaaatcattaatccgcaacaaatcccgccagaaatcgcggcgttaattaattaagtatcctatgcaaaaagttgtcctcgcaaccggcaatgtcggtaaagtgcgtgagctggcgagcctgcttagcgacttcggtcttgatatcgtggcccaaacagacctcggcgttgattccgctgaagaaaccggcctgacctttatcgaaaacgcgattctgaaagcgcgccatgcggcaaaagtgaccgctttaccggcaattgccgacgactctggtctggcggtagatgtgcttggcggcgcgccgggcatttactccgcgcgttattccggtgaagacgcgaccgatcaaaagaatctgcaaaaactgctggaaacaatgaaagacgtaccggacgaccaacgtcaggcgcgtttccactgcgtgctggtatatctgcgtcacgcggaagatcccactccgctggtatgccacggtagctggccgggcgtgattactcgtgaaccagcgggcactggtggctttggttatgatccaatcttcttcgtaccttccgaagggaaaaccgccgccgaactgacccgcgaagaaaagagcgccatttcccaccgtggtcaggcgttgaaactgctgctggacgctttacgtaatggttaaattacctccgctgagtctctacattcacatcccgtggtgcgtgcagaaatgcccgtactgcgatttcaactctcacgcgttgaaaggagaagtgccgcacgacgattatgttcagcatctgcttaacgatctggacaacgatgtggcttacgctcagggccgtgaagtaaagacaatctttattggcggtggtacgccgagcctgctttccggcccggcgatgcaaacgctgctggacggcgtgcgtgcgcgtttgccgctggcagcggatgcagaaattactatggaagcgaaccctggcacggtagaagccgatcgctttgtcgattatcagcgtgctggtgtgaaccgcatctctattggtgtgcagagttttagcgaagaaaagctgaaacgacttgggcgtattcatggcccgcaagaagcgaaacgcgcggcgaagctggcgagcggtttagggttacgtagctttaaccttgatttgatgcatgggctgccggatcaaagtctggaagaggcgcttggcgatctacgccaggccattgaactgaatccgccgcatctttcctggtatcaactgaccatcgaacccaatacgctgtttggtagccgaccaccggtgctgccggacgatgacgcgttgtgggatatattcgaacaggggcatcagttattaaccgcagcgggttatcagcaatatgaaacttccgcttacgccaaacccggttatcagtgccagcacaatctcaactactggcgctttggtgactacatcggtattggctgcggcgcacacggcaaagtgaccttcccggatgggcgcattctgcgtaccaccaaaacgcgtcatccgcgtggttttatgcaaggaaggtatctggaaagccagcgtgatgtcgaagccacagataagccgtttgagttctttatgaatcgcttccgtctgctggaggccgcgccgcgcgtggagtttattgcgtataccgggctttgcgaagatgtgattcgcccacagttagacgaggcgattgcccagggttatctcaccgaatgtgcggattactggcagataacggaacatgggaagctgtttttaaatagcctgctggagctttttctggctgagtaaacttgtattgccggatgcggcgtgaacgccttatccagccgacatgtggcagcggttgtaggtctgataagacgcgcaagcgtcgcatcagacgttgattgccggatgcggggtcaacgccgcatcctgctacaaatcgtgcactatatcaaacttacttaatcaccccattgcgccgcagttgttcggtatcttttttccagcgttcattagcttggttgatatcgtcaattttcatcaaaatcgcgacttttttactgtttatttcactaactttcatcgttaacggatattgccctttttcgagcgttacccagtcatcctgcaatttacggctaagtttttgactttgcagaaaagtctgtcgccgttgttcgttgatatcgaaatctcgtttctgctgaatcggcacttcataacactcttcactctgtttatgacatgccgcaatcgccggttgataaacctctttgtcatatttaaccgcgaacgcctcgctatcgttctgtttattaaactcatcacgctgttggtgaatttttttaaaggcgtcttcgcgggtcatttgcttaccgtttgcatcttttccccaatatgcatccgctgctttctgcgccgccaccatttgcttatcaagcgctttcacttccttttccagcgcaggaatgctgttcttctgggtattcaacgcagattcaagctgactaaagcgataattgaaatcttcgctattcacgatcagatatttattattcgttttgatatcgtcgaccacccgcccacgatcgctggctgccgcctgaaaagagtaaaagttcacgctccagccagacgcgggcgttcctttactggttaacatcgcgctgaattttaccggtttatctttcgtccaggtctgttcgagcagttcgtaatctgccaactgaccgacccaggtatagagatcgtcactggaagagacatcgccttccgcactccaggtggcctgattacccttagcatcaagattttttaaggtgatagcatcaagcttgagaatgccgtgatactgctttttgaattgatcttttaagatattttcagttggcggttcgccatctgcccaggcattaccagtcatcaacataagcagtgccgtgccaacaatccattgctttttcacccgaaaaacctcacgcggaataatttattccggtgattatcattagggtaattaaaattggcaatggacgtgagtctgaagtgaaaaagccccggcacgataccggggcgaggcgattagtactgattgaagatctgctggatctgctgcggatctttggtttgcgtcagagccagttgcagcagaacgcgcgctttttgcgggttcagcgtgccagaggcgacgaagccgtatttcgcatcatccacttcggcatcctgagtggtagcgcccgtcggtacgcgggaagaacgcacgactgcagtaccggttttcgcggcggtcgccagcgtgtcgaacacagatttatacaggttgccgttacccacaccagcgctaacgatgccatcatagcccgcatctaccagtgctttagccggaagatcggatgcgttagcgtagttataaacaatgccgactttcggcagttcattcagcttagagacatcgaatggcgtgtcgctggtatgcttacgtgccggggtacgctggtagtcaatcttaccgttgtgaatgtaacccagaggaccgtagttaacagacttgaaggtcgctacgtcggtggtgttggttttggtgacgtcacggccatcaagcacggtgtcattcatcactaccagcacgccacggttggcggaggctttatcagctgcggtcactaccgcgttatacaggttgaatggaccgtctgcgctcatagacgtggacggacgcattgcgccgaccatcaccaccggtttgtcgcatttcaccgtcaggtcgaggaagtaagcagtttcttccatcgtgtcggtaccgtgggtaatgacgaagccgtcggtcttatcgcagtcggtgttaatttttttcgccagtgtcagccagacattatcgttcatgtcctgggagccgatattcactacctgctcgcctttaacgttcgcaatgtcttttagttgcggcaccgcattaaccagattttctacgccaactttacccactgtgtagttagatttggttgcggagtcaccaccaccggcaatggtcccgccggttgctaaaatggtgatattgggtaatgccaatgctgcaccactaaaacccataaccagtgcggcaagtgccgtctttttgaaaaactccatttcattcctccagttacgtgaacgctacgcattatcccttagctctgtatgggaaatttgacgttaaacaatttacaacgtgaatatattttggagatctacaaagttagaggcaggtaacaaaacgaagaattaaacggcataaaaaagtattatgccgtcttaaaatagaggattattttaaattcccgaccagggctttgcggctatcttccagagtcacaacgcggctacaaacatctttgccaaactgctggaaatctttttcctgctttttccactcggtttggatactggattgcagcccccccaggcttcccagcacattctgtaatgggttaccgccgctttttcagcaccgctttcgcgcccatttcattaatgctgtcctgtaaaattccacccattgcctgattcactaattgctggccttcggcgcgaacctgatcaatggctttatagtgaaacgtcaggccatcgctgcgcgtttcaataatgcggttcatctgctctttcagctgcgcatcaagtttggtcagacggctgcgcattttgctgctttcgcccatctcctgaacgataattttatccagagcaatacgggctttctcgacgcggcttttcgcgccttcatcaatccacggcagcgtgctgcgtagttcagcctgataatccttcgcctgctcgcgctgggcggcattcagggaatattgcttaccgttatacatcacgttgccgtctggcgtgatcaccagattgccgttttcgcccttcacctgcacggtttgcgggctgacaatcacatcgtcacgcggcgtgacgctgcactggtagtcggcgtgagcggtcattgccgtcacactaagtgctgccgccagcagcattttgcgcatcatagtcttccctcaagaaaaaatcaggccagcatttgctggccccagattgataacaaagtacgcgttttccatgccggatgcggcgtaaacaccttatcccgcctactcgatcgtgcatctttccaggcctgataagcgtagcgcatcaggcagttttgcatttgtcatcgcccgtatgctttcttagtcccaccaaacgtcgaaaagttcgctggtgcgtacctcatccagtttgcgctcttccagccacttacgcacaatcgcctgatgttcttcggtgcatttgccgatttcctgcatgcagatcagaccttcccaggccagataaccgctgccgtcaaaggccagtttgttcggttcgataacctcgttaataaaatcatcaacggttttatcaatctgttcttcgcttgtaccttccgggaatcgccatgccacgctaaatcctaattcctggaattcgtcgatgtgcatttttttacgcagacgacggctacggttctttgccattatttcaccctctcgaacattaagtcccatactccgtgaccaagacgatgaccacgttgttcaaatttcgtcaccggacgacttgccggacgcggtacgtaatcattgctctcactcaggtttttataaccgtcaatagaagacatcacttcaagcatatgttccgcataaggttcccagtcggtcgccatatggaatacgccccccagctgcagtttgctttttaccagttcggcaaacggcacctgaacgatacggcgtttattatggcgcgctttgtgccacgggtcagggaaaaagagctgcaccatgcgcaaactattgtcaggaatcattttatgcagcacttcaaccgcatcgtgacacatcacgcgcaggttgcttaaaccttcttcatgcgcagaagccaggcacgcaccaacgcccggactatgcacttcaatgccgaggaagtcctgctcagggcgatctttagccattgccaccaggctcgcccccatgccaaaaccaatctcaagcgtcaccggcgcttcacggccaaaaagcgcggggaaatccagcatatcttcgctgaactcaacgcccatcaccggccagtagttttccagcgcatgttcctggcctttggtcagtcgcccctggcggcgcacaaaactacggatacggcgcagtgggcggccgttttcatcaaattccggactaatgacgtcgtttttcataaaggtttagtcgcttgtgaaagtgttctgaaaacgggcattatccaaagttagttgccggatgcaagcatgataaggccgtggctgcggaaagttccggtttacaccctgccgtcgctgtgctgcaatcttgcccccaacaacagtgaattcggtgaccatgcaagcgagccaatttagtgcccaggttctggactggtacgataaatacgggcgaaaaactctgccctggcaaattgacaagacgccctacaaagtatggctcagtgaagtgatgttgcaacaaactcaggttgcgaccgttatcccctattttgaacgctttatggcgcgcttcccgacggtgaccgatctcgccaatgcgccgctcgacgaagttctccacttgtggaccgggcttggctattacgcccgcgcgcgcaatctgcataaagcggcacaacaagtggcgaccttacacggcggtaaattcccggaaacctttgaggaagttgcagcactgccgggcgtcgggcgttccaccgcaggcgcgattctcagcctttctctgggtaagcactttccgattctcgacggtaacgtcaaacgcgtgctggcgcgctgctatgctgtaagcggctggcctgggaaaaaagaggtcgagaataaattatggagtttgagcgagcaggtgacgcccgcggttggcgtggaacggtttaatcaggcgatgatggatttgggtgcgatgatttgtacgcgcagcaaaccgaaatgtagcctctgtccgctacaaaacggatgtattgccgccgccaacaatagctgggcgctttatccgggcaaaaaaccgaaacagacgctgccggagcgcaccggctactttttgctattacagcacgaagatgaagtattgctggcgcagcgtccgccgagcggattgtggggcggtttatactgtttcccgcagtttgccgacgaagaaagtttgcggcagtggctggcgcaacggcagattgctgccgataacctgacgcaactgaccgcgtttcggcataccttcagccatttccacttagatattgtgcctatgtggcttcccgtgagcagtttcaccggctgcatggatgaaggcaatgcgctctggtataacttagcgcaaccgccgagtgttggcctagcggctcccgtggagcgtttgttacagcagttacgcactggcgcgccggtttaacgcgtgagtcgataaagaggatgatttatgagcagaacgattttttgtactttcctgcaacgtgaagcagaaggtcaggattttcagctgtaccccggcgagctgggaaaacgcatctataacgagatctccaaagaagcctgggcgcagtggcagcacaagcaaaccatgctgattaatgaaaagaaactcaacatgatgaatgccgagcaccgcaagctgcttgagcaggagatggtcaacttcctgttcgagggtaaagaggtgcatatcgagggctatacgccggaagataaaaaataaaaacagtgccggagcacgcctccggcaacttgcataaaaacaaacacaacacgcacccggaatgatgaaaaaatatctcgcgctggctttgattgcgccgttgctcatctcctgtagcacgaccaaaaaaggcgatacctataacgaagcctgggtcaaagataccaacggttttgatattctgatggggcaatttgcccacaatattgagaacatctggggcttcaaagaggtggtgatcgctggtcctaaggactacgtgaaatacaccgatcaatatcagacccgcagccacatcaacttcgatgacggtacgattactatcgaaaccatcgccgggacagaacctgccgcgcatttgcgccgggcaattatcaaaacgttattgatgggtgacgatccgagtagcgtcgatctctattccgacgttgatgatattacgattagcaaagaacctttcctttacggtcaggtggtggacaacaccgggcagccgattcgctgggaaggtcgcgcaagcaacttcgcggattatctgctgaaaaaccgtctgaagagccgcagcaacgggctgcgtatcatctacagcgtcaccattaacatggtgccgaaccaccttgataaacgtgcgcacaaatatctcggcatggtccgccaggcgagtcggaaatatggcgttgatgagagcctgattctggcaattatgcagaccgaatcttcctttaacccgtatgcggtcagccgttccgatgcgctgggattaatgcaggtggtacaacatactgccgggaaagatgtgttccgcagccaggggaaatccggcacgccgagccgcagtttcttgtttgatcctgccagcaatattgataccggcaccgcgtatctggcgatgctgaacaatgtttatctcggcggaattgataacccaacaagccggcgttatgccgtcatcaccgcctataacggcggcgcaggcagcgtgctgcgagtctttagcaatgataagattcaggctgccaatattattaacaccatgacgccgggcgatgtttatcagacgctgacgacccgccatccctctgcggaatctcgccgttatctttataaagtgaataccgcgcaaaaatcctaccgccgccgataattccattaaccgcccctgacgatgctcaggggcaaaaatgttatccacatcacaatttcgttttgcaaattgggaatgtttgcaattatttgccacaggtaacaaaaaaccagtccgcgaagttgatagaatcccatcatctcgcacggtcaaatgtgctttttcaaacactcatccgcatcacgatgtgaggaaattaacatgaatcttaagctgcagctgaaaatcctctcttttctgcagttctgtctgtggggaagttggctgacgaccctcggctcctatatgtttgttaccctgaagtttgacggtgcttctattggcgcagtttatagcagtctgggtatcgcagcggtctttatgcctgcgctgctggggattgtggccgacaaatggttaagtgcgaaatgggtatatgccatttgccacaccattggcgctatcacgctgttcatggcggcacaggtcacgacaccggaagcgatgttccttgtgatattgattaacagctttgcttatatgccaacgcttgggttaatcaacaccatctcttactatcgcctgcaaaatgccgggatggatatcgttactgacttcccgccaatccgtatctggggcaccatcggctttatcatggcaatgtgggtggtgagcctgtctggcttcgaattaagccacatgcagctgtatattggcgcagcactttccgccattctggttctgtttaccctgactctgccgcatattccggttgctaaacagcaagcgaatcagagctggacaaccctgctgggcctcgatgcattcgcgctgtttaaaaacaagcgtatggcaatcttctttatcttcagtatgctgctgggcgcggaactgcagattaccaacatgttcggtaataccttcctgcacagcttcgacaaagatccgatgtttgccagcagctttattgtgcagcatgcgagtatcatcatgagcattagccagatctctgaaaccctgttcattctgaccatcccgttcttcttaagccgctacggtattaagaacgtaatgatgatcagtattgtggcgtggatcctgcgttttgcgctgtttgcttacggcgacccgactccgttcggtactgtactgctggtactgagcatgatcgtttacggttgcgcattcgacttcttcaacatctctggtagcgtgtttgtcgaaaaagaagttagcccggcaattcgcgccagtgcacaagggatgttcctgatgatgactaacggcttcggctgtatcctcggcggcatcgtgagcggtaaagttgttgagatgtacacccaaaacggcattaccgactggcagaccgtatggttgattttcgctggttactccgtggttctggccttcgcgttcatggcgatgttcaaatataaacacgttcgtgtcccgacaggcacacagacggttagccactaattacgcaaagaaaaacgggtcgccagaaggtgacccgttttttttattcttacttcaacacataaccgtacaaccgtttcacgccatccgcatcggtttcgctataaacaccttgcagctccgggctaaatcccggcaacaaattcaccccttcttccagtgcaaggaaataacgttgaaccgccccaccccagacttccccgggtaccacgcaaagcacgccaggtggataaggcaacgccccttctgccgcaattcgcccttcggcatcacgaatccgcaccaactccacgtcaccgcgaatataagcgctatgcgcatcctgggggttcatcaccacactcgggaaactctgctggcggaacatcgctttttgtaggtctttgacgtcgaaactgacatacagatcgtgcatctcctgacacaactggcgcagggtgtagtcgcgatagcgcaccggatacttgttataaacgctcggcaacacctcaaccagcgggctgtcatcctcaatatgctgttcaaattgcgccagcatcgccaccagttgtgccagcttctcgtggctttccgccggagttaataaaaacagaatggagttgagatcgcacttctccggcacaatgccgttctcacgcagatagtgcgccagaatcgtcgccggaacgccaaagtcgctatattcgccggtttcggcatcgatacctggtgtagtgagtaacagcttgcacggatcaacaaaatactgatccgcggcatatccttcaaagccgtgccacttcgcccccggctcaaaactgaaaaaacggcggtcgctggctaacacacttgtcggataatcctgccacaatttgccatcaacaacgggcgggataaacgggcggaacagcttacagcgcgcaagaatagccttgcgcgcttcaatccctatctcaacacactcagcccacagccgacgcccactctccccttcatgaattttggcgttaacatccagtgcagcaaacagcggatagaaagggctggtagaagcatggagcataaaggcgttattcaaccgcttatgcgggcaaaaacgcgcctgtccgcggatatggttatcttttttatggatctggctcgtctgactgaatcccgcctgctgtttgtgcacgctctgagtcacaaagatccccggatcgttttcgttaagttctaacagcagcgggctgctatccgccatcatcgggataaattgttcataaccgacccacgcggaatcaaacagaatgtaatcacacagatgcccaacggtatcgatcacctgacgggcgttatagacagtgccgtcataggttcccagctgaataatcgccaggcgatacgggcgcggcaggtcggctttttctggcgcaacgtcgcgaatttgctggcgcagatactcttcattaaaacagtgcgcatcaataccgccaatgaaaccaaacgggttgcgactagcttccagatagaccggcgtcgcccccgcctgaatcagcgcgccgtgatgattgctcttatggttgttacggtcgaagagcaccagatcgccacgcgttaacagcgcattcgtcaccactttattcgctgcgcttgtgccgttcagcacaaaataggttttatcggcatgaaagactttggctgcgaatttctgcgcatctttcgcgcttccttcatgaataagcagatcgcccaattttacgtcagcgttacacatatcggcgcgaaagacgttctcaccaaagaaatcgtaaaaatggcgtccggcaggatgctttttaaaaaacgcaccatgttgatgtccagggcaagcaaaggtgctgttgcccatctcaacgtactgcgtcagcgtgtcataaaacggtggcagcaaattctcttcatactgacaggctgcggattccagctccagccactgctgctcgttgccgttgattaccgccgtaacgcccgcaggtaattcaacagcatgttcggaatacaaaaacaccggtagatgaaaaccggtgcgcttaagcaacgcaagaatgccactgcgactatccgcagcggtaatgacgactgccgcgacgtccgtaaaatcagtatctcccaacgccaccacgcgacgatgagaagaaagtcgggataccagttcactactggcggcaatattcatacttttcataagcgcaaacccgtttcggggaagtaagaataccggacaaggtggaaaaccctgccccatgagatatgggtcaaactggtcaccagctccgaccgccagacatcagtaaaagcagaaacgctctgattttactgttgtcctgcagtgagcgtgcgttaacttcaccgcatgagcagtaacatagaaagggaaacgtttcgcgcgaaacggcgataagcgagagaatgtaaggagatggcgtgcatcgggcaaactccgtacagagaggagaaaattcgcgcaatcatggcacctttcgctaaagcgtgcaagccaggactttgcgaacaaacaagccatcgacggcaccaaacggtcataataagaaaatcaaacaatacagctaacaggaactcttgtggtcatcggcccttttatcaacgctagtgcagtcttactgggtggcgttctcggcgcactgctcagccaacgcttaccggaacgtatccgcgtctccatgacaagtatttttggtctggcaagcctggggattggtattttactggtggtgaaatgtgccaaccttccagcgatggttttagctacgctacttggcgctctaattggcgaaatttgtttgctggagaaaggtgtcaatacagcagtcgccaaagcacaaaatctgtttcgtcacagtcgtaagaagccagcgcatgaatcttttattcagaattatgtcgcgattattgtcctgttttgcgccagcggcaccgggatcttcggggcgatgaacgaagggatgaccggcgatccgagtattttaatcgccaagagttttcttgatttctttacggcgatgatcttcgcctgcagcctgggtattgcggtaagcgtgattagtatcccattactgatcatccagttaacgctggcgtgggctgccgcgctgattttaccgctgaccacaccgagcatgatggcagacttcagcgccgtaggcggtttattgctgctggcaaccggattacgcatctgtggcattaaaatgttcccggtggtcaacatgcttccagcactccttctggcaatgccgctttccgccgcctggaccgcctggtttgcctgacaatgcgtgcaatatcggcaaagtgatgatagattgtgcagtctgcagtaaattgaagaaatttgattgacgagacgaggcgaatcaggtttaatgcgccccgttgcccggatagctcagtcggtagagcaggggattgaaaatccccgtgtccttggttcgattccgagtccgggcaccactaattcttaagaacccgcccacaaggcgggtttttgcttttggatctgacaataaccttcacgaaaaaaattagcttataaagtctgggggaattactctcgccacgttaacgagagtaattttattgatattaatctcctgatactttacccccgtccaaactccagccgctgcacattcaccatcccaggcttctcagcagcactgacatcaatttgtgtcacccgcagcgcatagaacgccattttgaatttacgaacggacgcattatcagtgactttaacggcatgggcaaagtgaaatatcattttttaacgataaaaagagtgttatttcttgtgtatcagacaataagcattcattcaaaacctttagaaataatcaaaacacaggtattccactggttaatatattcacatatgaaatgaataaatattggaatatataaatattgaatattttgattaatccccgtactgattattcttcataatcagtacggggttgctacaacatgtattactttttcaccacaattaacggttcaatatcactctcttttttgatgaccagactttcatcaccgcgcaaacacgtcccaccgtagttgccgccaacggtgaaggtacatacctgaatgtatttaccgtccactttcggcaaacaccacagttgctgatagatgtttttctgctcggcaaatttaccgctggttttgtccagcacctcttcatgatggctgacgaggtcgatattgctgccacagcgaccggcgatcggtttcactgcgtaacctgttttcaccagttcatcattaacagtgaaatcggtatccagcaggtaacgatggtgcgggaacaggctccagaggatcggcagaatcgctttgttgccggggatcaccgtccacagcggctcaaagaccagcacttccgggcgcagcaatacgtcgataagacgcacttcgttttgcggatgaccggtacggattggcaccgcagcaaactcacggtcgctaacttcacgaatctgatcaaacgcggtttcccacgcccaggttttccacacgcagttaaccagtcgcccttccccatcaatcagttgcccggcagcatcccagcccagttcatccaatccacgcaagatacgcgtttcaaagcccgcctggtgcagcgcctgctccataaactgcgcgtgatagttttcctcgatatctttgtcctgcatgatatggacaaacggacgtgcacgactgtgtttccaggcaccagccaattcgttaatcagcccttccgccggattgaagccgttgcctttatagccctgctccgcccaacgttcgaggatcaagcccgcttcggtatgacaggaggcggagtcggcgttgtactcgtaaaccttcaggccacgctcatccatgcagaaatccatacgaccagtgatcatatggtgacggcgacgctgccaggagagacgcaaacgtggccagaggattttcgggatgtcgaacagcgccagcaggttgtcatctttcagcaccttgtcggttgcgtgaagatacatcaggtgcagctcgttggtggctttaattagctcctgctcggcactctcggtaatggtgtagtaatgataaggatcctgattgatcacctgaccgttggcctgcacataggcgttttgcagcggatctttttcatccagccatttaccgtcaaactggcctttgttttccaggcgcgctccgctgattttcagcagctcgcctgcaatttccggctgcggtaagctgtattcagtatcttccgtctggatcatccagcccagaatggtggtgtcatcaaaagtgtctttcagggtatagcagccgttttcgaccaccatctccagctcgcgcgtccactgttgcccttgcggcaacggggaatgaatcacgttctgttccgcaatacggactttgttgccatgcaattgggtaatgatggcgacatggccagtgtctttaaattcaccgcctttatcccagataagaagcgcacccgcgaccggcgcacgcgggctgccgttaggaaatgcctgcaatggcaggatgttgtcattaaccacttctcgcaggaagcgcaggctgaaaatctcccacgccatacccacgtcagtaaagaccacaccgtaattcagaaagagaaaacggcgagcaaattcaacgcattgccacttgtggcccatatattcgtcgtcgatatagctacggaatacggcgtcatcttcgtattcctgcggatcgagagaactgtaatcactagagtagattgctaccccacctggggcgtagcccaataatgtcccgaacggggcatcctggctggtcgttcctttgctcatcactttacctttaacaatacaacctaagcagttggcgtaattgttgtgctctgattacctgctcagcgacattaaccggacagaggtcagactaatcatacacctcatcgcagcggctggcgcaaagggttaaaaaattcacattctgtacagcaagtgacctgctacactgcttcaacactaccactcagaaggcaactcactatgacagacaatacttatcagcccgcgaaagtctggacgtgggataaatccgctggcggcgcgttcgccaatatcaatcgcccggtttctggtccgacgcatgaaaaaacgctgcccgttggcaaacacccattgcaactttatagcctgggaacgccgaacggtcagaaagtaacgattatgcttgaggagctgctggcgctgggcgttactggtgcagagtacgacgcctggctgattcgtattggcgatggcgatcaattctccagcggctttgtcgaagtgaacccaaacagcaagatcccggcgctgcgcgatcatacgcataatccgccgatccgcgtgtttgaatctggtagcatcctgctttatctggcggagaaatttggctacttcctgccgcaggatttggcaaagcgtactgaaacgatgaactggctgttctggttacagggcgcggcaccgttcctcggcggtggttttggtcacttttaccattacgcaccggtaaagattgagtacgccatcaaccgctttaccatggaagccaaacgtctgctcgacgtgctggataagcaactggcgcagcataagtttgttgcgggcgatgagtacaccattgcggatatggcgatttggccgtggtttggcaacgtggtgttaggtggtgtgtatgatgccgctgagtttcttgatgcgggcagttataagcatgtacaacgctgggcgaaagaagtaggcgaacgtccggcggtgaaacgtgggcgtattgttaaccgcaccaacggaccgctgaatgagcagttgcatgagcgccatgacgccagtgatttcgagacgaatacggaagataagcgtcaggggtaagggttggtgttcgtcgcagcaagccatccaggccggataaggcgttcacgccgcatccggcaatcgtgcacaatgcctgatgcgacgctgccgcgtcttatcaggcctacgaaagctaatcatcacgcgctggtaatgtcgtaatccatttggcgcagtgcgtctaatgtggctttggcttcatcttcgtcgatgatgctcatggcaaatccgacgtgtaccagcacccactggcccagtagatcggcagggttaccttcacaaatcagggcgatattcacatcgcgcttgataccacatacttcaacctgcgcaagctggtgaatatcttcaccgacagccagcacctggcctggaacgccaatacacattattaactccggttattcaacttcaatacttttgacgatcaggctatcgccggtatcgacacgcaaccgctcgccgtgacagagcggacactgcgcatcgtgctgatgaatctccaccacctggctgcaatcccagcaccaagcctgggcgggtttatagacgatatgtaaatcgcacccttgcgccaccgttccgtggcagacaatttcaaaactaaaacggacggcgctctcctcaacgcaggagagcgcgccaatttccagccacacggcggtgacgcgcttaacatcgtgctgctccgcctgccgttggataatttcaacggcgctctggcaaagagacaactcatgcattttcgccactcctgcgaccaaacagcagggcgcgacgccctgcgtgtggtacatccggattcgtgactggcaggctaaggatcattcgtgcgcagtcatccgtcaggcgttggccctcttcaatgctcatgctgtggctaagcgggctcatcaggctacaggagagatattggctaacaccgtccagttcgccaacggtaaaggtcatagtgccatacggcagttgcagaccaattttttcactcactttgcgcagcggccagagttgatccgggccggggaagataactgcactcagcatccacggggtgatcacacaccccgtccactgaccttcgaacagcgtaaaatcagaaacatacaccggcatactaggatgcagaaaagagagatcgtgcatgctacgccgggcaatttcttcaaacgctgcctgtacttgcgccttcggggaggtctggaaacctgctatctcttcagtcatgaatcgcctcccgtgggatggcttccacgccagattcacgcagcgcagccagaacctgctcaagcgcaggttcaatcattgcttcaaccgtcggcgttaagccgatgtgtggctccaggctttccgggatcacgccgaccagggtcagctttttcggaaactcgccggtgaagcgcagggcgctcaagacgtcggccaggccaagctgatgcggagagattttgttggtaaacaacgccggaacttcttcatcccgcaggatcatcatcgttcccggcgcgttctttttgctgacaatggcatccgcaataatcaaatgatcgcgatttgccatgtcgccaagcagctccattcccgccgtgccgccatcgaggatctcaacataatccggcagaatgtatcgttgctctaacgcttcgacaatccgcacaccgatggcttcatcggtcagcaaaatattgccgacccctaagactaaaatacgcattacagaaccttcacactaaccacttcgttgccgtcagcatccactacgtgtaccgcacaggccatgcacgggtcaaaggagtgaatggtacgcaccacttccagcggtttattcggatcggcaaccggtgtacccaccaggctctgctcgtaaggaccgacgtcatcattgaagttacgcggaccagagttccaggtacttggaacaaccgcctggtagttgctgatgataccgtctttaataaccatccagtgagagagcataccgcgcggcgcttcgaggaagccaacacctttgaattcacccgttgccggaatgttcggcttcacaaaggtggtgtgatcgcctttgccgatattggtgatcagtgcactgtattggttttgcaggatatcctgcaattcacagcagtgaacggtacgaccaataatacggcccagcgtggagtgcagctgtgccacttccagcgtgttgccagtcagtttctgataaatcgcaacgatttcattcagtttgttctgggtagattcgcgacctgccgccagtttcaccagcatattagccagtggccccacttctaccgttttgccgtagaaagtcggacttttcacccaggaatatttcccgtcgtcagaccaaccatcataagccggaatggtggtgccttcccacggtgcctgcggcgcttcgtctttataccaggagtgcttcgcgctttcctgaatgcctttgatcaggtattcatcggaatgagaagtgatcggacgatagctggacagatccgcattctcaatgtagccgcccgggaacaggaagctgccgtttttactgtcggtcgggaattccggcacgctcaggtagttcaccgcacctttaccgcgtgtcagccattccgggtagaacgcggcaataactgcggtatcaaccttataaacctgctcaacaaagtcgctcagtttgtcgatgaaagacttgatgtacatcaggcgctcaaggttcagcacgcccaaaccgtcgaggttgatcgggttcgcgacaccacctaccgccaggttctgaatgtgcggcgttttaccgcccagcagcgccacgacgcggttagcgtcacgctggcactccaacgcttgcaggtagtgcgctaccgcaatcaggttcacttccggcggcagtttcatcgccggatgaccccagtagccattagcgaaaatacccaactgaccgctggcaaccagatctttgatcttgttctgaactttggtgaactcttccggactgttcaggtgccaggtgctaacgcctttcagcatttcggaggctttggttgggtcagcttgcagtgcagaagtgatgtccacccagtccagcgcgctaagctgatagaaatgaacaatatggtcatgcgtggtgtgcgcagccagaatgatgttacggatgtattgcgcgttaaccggaacgtcgatattcagcgcactttctgccgcacgaacggaagacagcgcgtgagtggtagtacatacgccacagatacgttgcacaatcatccatgcatcgcgcggatcgcggtttttcacgatctcttccatgccgcgccacatggtaccggaagcccatgctttgctaacgacgccattttcgatttcgcaatcgatgcgtaaatgcccctcaatacgggttaccggatcaatagtaattctctggctcatgctttgctcgcctcatgacgattatgatcgttttgttttaaaggaggaagtatcggcagtagacgaatgagtacgatgtaagcgcaaatctcaatagccacaaaaccaatagaaatcaacagttcttcccaggtcgggaagtaggcgtaaccgccgcccgggttgaatgccaccaggctataggtcagacgccaggttgcacaacctaacagtgcgctcagtgcactcaggaacagcatgcgggaatcattacgcagcttcgccacacgcagaacgaccagcgggaagagcatcagcaggacttcaatccagaacatcacggagtagaagtcaccggcaaacgctaagctcagcttgtcgcgatagataagctcgccaaagcgcagcacgatgaaaatcgccagcaacacactgatggtgttggtcagcttaacaaacagactcttttcatccggaccgttgccacgcagacccgcctgcaccaggctaccttcaaagatgacaatgctgaagcccatgatgaacgccgtcagcaggctgaacagcggcaacatttcatagctctgccacaacggatgcaccttgtagcccgcgctgatcatcaggctccccatactagactggtgcatggtcggcagcagcgcaccgagcgcgatgatgaagaacatcaccttgtttagtcgctgtaggctcaccttccaccccagacgttcaaacagtgccggagcaaactccagtgccatcacgccgatatagatggtcatacagaccgccgtctcgaacagtacgctgttcacgttgaagtgacccggaatgtagaagtacggcaggttccagtagcgacccacgtcgatagtgatgctcaagccacccagactgtaaccaaacagactcgccaacagcgccggacgcaccagcggatggtattgcccacggttaaagacgtataccgcccacgccagcgcccagccgccacaggcaaagccggtgccaatcagcaggtcaaacgcgatccacacgccccacgggaagccgccgttcaggtcagagacagagcccagaccgaacaccagacgcttcacaatcaggagcatacagatgacgattaacggtccaaaaatcatgaccggtttactgatgattttgccgcccagcggttgtggatcatgactcatgatcgtctcctccgtcgtgattattcaactctcatgatcgtctcctccgtcgtgatggtcgtttttggtgttgcgacgaaccagcacggttaagcccgccagcacagccagtggtagcatcatgcctttatacagggtgtgttgaatattttcggaacgcgcaccggtagaaagatcgtccagtttcggcaggtcgagattttcataaggcacacccgtcagtaccagaacctgagtaccgccgccctctttctcgccgtacagatgcggataatatttcggcaccgtatgcaggtaagtgtcgccagatttcagcgtctgacgcggatagtggtattcgctgccaggcttcagcgccagacgttttttcgcctccgccatcagctcttcacgcgtaccgaaaatcaccgcgcccgccgggcacacttctacgcagccaggtagaccgcctttatcgagacgttccacacctttctggttgcacagctcgcacttatgcagcgcaccaaacgggttgttgtagtcgtacttcggcacgttgtacggacaggcgaccatgcagtaacggcagccggtgcacacatctttgtcgtaatggacaatgccggttttcggatcttttttcagtgcagagaccgggcacacagagacacagttcggatcgacgcagtgcatacactgtttcttaatgtacgcgtagccgttctcctcctggtctttgttgacccctgtgccgctggtccacacctgaatgatgttattggtatacgggctcagtttgtcgttgttgctccaggtctgttccccttgcgggttacgttcagggaaattgatatcctgacacttggtgacgcaagcctggcagcctacgcacaaggtgctgtcgtacaacatccccaggcttcccggaattggcgggcggttttcagcagccgcatgactgacagacggcagcgcgcccgtcagcaatgccccgcaggaggctgctttaataaaattacgtctgttcacggttattctccccgactgtcagcgttatctttcttttgctgacgacccagttcacgcaccgccatcacgctgacaccggcaaccaacccaaccacaccgccgagcaaaccaatagcgcctgcagagacgttgccgccctctttagcgttaacatccggtttctgactacgcggagtttgattttcgacgttggcaagctgatggatgcctttatggaagccgataccttcttcgttacagccatagcaagggtgaccaatcgccaccggccacacaccgccaacatcgcagaattgcagcgtactgcagttgccgtaagtttctggccctttacagccgaggtggtacaggcaccagccttcgcggtggccttcatcaccgaactctttggcaaaacgaccagcatcgaagtgcgggcgacgttcgcagtgttcgtgaatcagacggccataggcgaaggtcggacggtttttgtcatccagtttcggcggtttgccgtaagtgatgatgtgcgcaacggtcgcgaggaagttgtgcgggttcggcgggcagcccggaatattgataacggttttgcctggcagaacttcttgcaggctgactgcgccagttgggttaactccagctgcggcaacaccgccccacgcagagcaggaaccgatagcgataatggctgctgcgccttccgccgctttgcggatgtgatccacaatcggctcaccggcaaccatgcaataaataccgttatcttttaatgggatggaaccatccaccactaacacatactgccctttgtacttctcgagagcgttatgtttgttctcttcgacctgatgaccgaaggcggcggaaagcacttcgtgatactccagagagatagtctccagtacgaggttttctaccgttggatgcgttgcacgaagcagagattccgtacaaccggtgcactcctgcgcgccaatccagataactggcggacgctgcgggttagtaacgctttcggccatctctgcagcggctttgctacttaaccccatggtggcggctaatgctgcacaaagcttcatgaaatcacgacggttaatgccgtgagaatggatgagggtgttatctccagtcatttatagttattccgttgcgaagacctggcatatattttgcctcaatcgcaaaatcaataatgcgatcgatgcgccatttaccacacatttattatggttatcgatatcatgatactgcggcggggcgctaaaacgaagggaagaagcattagtgtaattaattaaagcaagataatacgtatgtttgatcaattttcgaggcgataaccggccataaaaaagcgcaacgtagaacaggaattattctcacgaaagaaatccattaccatctctttatccagtccatagcggcgcgtcagaatacccgcttcccaggcgctaagctggcgatctccggtcttttcgtacatccggtgactgtagcctaatacaaaaccgcgtttataatcggcacagaattttgtcacattaaccgcactgtcggcatgcgttgcttttaatcccgccattaagcctttaccaaaatggttattcatcgttcacctcattcgctatatattgtcatatatagcgatattttaggcaaagaacgacttttgcgcacgctattttttcatgcttgtttaagacgtaatcccgtaagagataaacctatcaggagagatatttatcgaaccatttcagtgtcctttgccaggcaagatcggcggcagatttgtcataacggggcgtggaatcattatggaatccgtgattaacccccggatagatatacgcctcataaaccttattattggctttcaacgccgcctcgtaagcaggccagccctcgttgattcgggtgtccagttccgcgaagtggagtagtaaaggcgcttcaatcttcgccacatcggcagtgggtgcctgacgaccataaaacggcaccgcgcaggccagttccggatacgcgacagccgccgcgttgcttacgccaccgccatagcaaaatccggtaatacccactttgcctgtcgcttgcggatagcgttgcataaactcaattgcggcaaagaaatcattcatcagtttgttggatcaacctgctgttgcagctcacgacctttatcatcatttcccggataacctccaacggaacttaagccgtcaggtgccagggcgatataccccgccttcgccactcgccgtgccacatcttcgatatacggattcagtccacgattctcatgcaccaccactacggctggcgttttgccgctcatctttgcgggcttcaccagataaccccgcacctcgccgtgaccatttgggctaggatacgtgatgtactcagcaacaatttccgggtcggtaaactctacctgagtcgccagcgcataatttggcttgagcaaatcaaacaacgctaatgccgtcatcccgcctaccgcacttcgccgcaaggttgaggaactcacgtttcgagattttcccgtgagcgtaatagtcatagtaatccagcaactcttgtgggaaatctttggcggttaaacgcggcatcgttgcactcctcagttggtgtttttttaagcaaagcataagcacgtatttttgcccagtttttcgtcactctgtgagccagactacgggatacgcgctggcgaatcgctaaactagaaacattgtttcgaaattgaacggtggaaaggagaggtcatggtctggttagcgaatcccgaacgttacgggcagatgcaataccgctattgcggaaaaagtggtttacgcctgcccgcgttaagcctcggtttatggcacaatttcggtcacgttaacgcgctggaaagtcagcgtgcgatcctgcgtaaagcgtttgatttgggcattacgcactttgatttagccaacaattacgggccgcctccaggaagcgcagaagagaactttggtcgcctgctgcgggaggattttgccgcttatcgcgatgaactgattatctctaccaaggctggctacgatatgtggcccggcccttacggctctggcggtagtcgtaaatacctgctcgccagcctcgaccaaagcctgaagcgtatggggcttgagtatgtcgatatcttttactctcatcgcgtcgatgaaaatacgccgatggaagaaaccgcctctgcgctggctcatgcggtacaaagcggtaaggcgctgtatgtcgggatctcctcttacagcccagagcggacgcaaaaaatggtcgagttgctgcgcgagtggaaaattccgctgttaattcatcaacctagctacaatttactgaaccgctgggtggataaaagcggcctgctggataccctgcaaaataacggcgtgggctgtattgcctttactcctctggctcagggattgctgaccggaaaatatctcaacggcattccgcaagatagtcggatgcatcgtgaagggaataaagttcgtggtctgacaccgaaaatgcttaccgaagccaacctcaacagcctgcgcttattgaatgaaatggcacagcagcgtggacaaagtatggcgcaaatggcgttaagctggttgctgaaagatgatcgcgtgacgagcgtattgattggtgccagccgcgcggagcaactagaggagaacgtgcaggcgctgaataatctgacatttagcaccaaggagctggcgcagattgatcagcatatcgccgatggcgagctgaatctgtggcaggcgtcttccgataaatgacctgttaataacgggcgcgcgaaccgcgcccgaatcagatcagtgattatgacgagtcagtcggtcaagatagcccatcacaaatgcagaaagcacaaacgtcagatggataatgacgtaccacatcagtttgttatccgggacatttttcgcatccataaagacgcgcagtaagtgaatggaagaaattgccacaatgctcgctgctactttgtttttcaggctcgttgcgtccattttccccagccagttcagcttctctttgttctcggagatatccagctgactgacgaaattctcataaccggaaaacatcaccatcaccagcaaaccgccaaccagcgtcatatccaccaggctcagcaacacgaggatcaaatcactttccgccatgctgaagatattcggcagtacgtgaataatctcctggaagaacttcagcgccagggcaactaacgccaggctaaggccaaagtacacgggggcaagcagccagcgagaagcatacattgcattttcaagaaaacgttccatacattcctgtcgtgtagttaaaacgggcaacagtatatcgcaattgagtaaacagcacgcaacagcaaatcaacatatacgttaaacctttgtcgcataattctgaggtttagggatcttcctggttcccttatcaacgcatcgagaacgtctacccttaaaggacgttgaacctgaagggagaaaaacgatgtctcatttaaaagacccgaccacgcagtattacactggtgaatatcccaaacagaaacaaccgacgccaggcatccaggcgaagatgacaccggtaccggattgcggcgagaaaacctatgttggtagcggtcgcctgaaagatcgtaaagcactggtgacagggggcgattccggaataggtcgcgctgccgccatcgcttacgcgcgtgaaggggctgacgtggcgatcagttatcttcccgtggaagaagaagacgctcaggatgtgaaaaagatcattgaagaatgcggacgcaaagccgttctgctgccaggcgatttaagcgatgagaaatttgcccgtagcctggttcacgaagcgcacaaggcgttaggcgggctggatattatggcgctggtcgccgggaaacaggttgccattccggatattgcagacctcaccagcgaacagtttcaaaagacctttgccattaacgttttcgcgctgttctggctaacccaggaagcgatccccctgctaccgaaaggtgcaagtatcatcaccactagcagtatccaggcataccagccaagtccgcatttactggactatgcggctacgaaggcggcgattctgaactacagccgtggcttggcaaaacaggtcgcggagaaaggtattcgggtgaatattgtcgcgccaggcccgatctggacagcactgcaaatttccggcggacaaacgcaggataagatcccgcagtttggtcagcaaacgccgatgaaacgtgcggggcaaccggcggaactggcccctgtatatgtttatctggcaagtcaggagagcagctacgtcaccgcagaagtgcacggcgtgtgcggcggcgagcatttaggttaaaaaaatgcccggttgtgaaaagcaaccgggcatcattgtgaattcactcttacctgatgtggcgaaaacgccttatccgcctacaaacgcatgaagattcaacatgttgcaatagattttgtaggcctgataagcgtagcgcatcaggcattgagcacctaatgccggatgcgtcgtgaacgccttatccggcctacaaacgcacgaagattcaacatgttgcaatagattttgtaggcctgatgagcgtagcgcatcaggcaattctactttacttcgctttggcggtttcttcgccgaccagacctatcttcaggtaacccgcctgatgcagcgtatccattaccttcatcaacgtctcgtaatcgacggttttgtccgctcggaagaagatggtggtgtctttcttgccttcggttaacgcattcaacgccgtaatcattgtttcatcggtgaccggatcgttaccgataaacatgctgttgtctgccttcacgctcagataaaccggtttttccgggcgcggctgcggcgtgctggtagaagcaggcaagttcaccttcacatctaccgtcgctaacggtgccgccaccataaagataatcagcagaaccaacatcacgtcgataaacggcgtcacgttgatatcatgcatttcgccgttatcgtcgaggttttcgttaagatgcattgccatcggatattatcctgcgcgtaatttttgtgcgacacgaaccggatgcgcagcggcgctggcttccagatccaggtcacggctttgcagcaacaatacctgcgctgcaacatcacccagcatcgctttaaagccgccaatctggcgtgcaaatacgttatagataacgaccgcaggaatcgctgccacgaggccgattgccgttgctaacagagcttctgcgatacccggcgcaacgactgccaggttagtggtctgcgtttgcgcgataccaataaagctgttcatgatgccccagaccgtaccaaacagaccaacgaacggagaaatcgcgccgatggttgccagatagccgttaccgcggcccatttgacgacccactgcggcgacccgacgctccagacggaagctggtacgttctttaataccttcgttatcgtcgctgccttcactcagttccagctcattctgcgcttcattgagcaaatgcaggcttaagcttttgctaccaaaatcagcggcgatatcgttggcctggtttaaggaacgcgcttcagccagcagttgctgctcgcgcttaaggcgacgcttctgattgaagaactctacgctcttactgaagaagattgcccaggtgactacggaggccaaaataagcccaatcatcacgcacttaacgacaatatcggcgtgctgatacataccccagacggaaaggtccgtctgcattaaattattacccactgtgtatctccaggacgcaagtcacaaaatctgcgcataataatatcaaaacgacgtcgaattgatagtcgttctcattactatttgcatactgccgtacctttgctttcttttccttgcgtttacgcagtaaaaaagtcaccagcacgccatttgcgaaaattttctgctttatgccaattcttcaggatgcgcccgcgaatattcatgctagtttagacatccagacgtataaaaacaggaatcccgacatggcggacaaaaagcttgatactcaactggtgaatgcaggacgcagcaaaaaatacactctcggcgcggtaaatagcgtgattcagcgcgcttctagcctggtctttgacagtgtagaagccaaaaaacacgcgacacgtaatcgcgccaatggagagttgttctatggacggcgcggaacgttaacccatttctccttacaacaagcgatgtgtgaactggaaggtggcgcaggctgcgtgctatttccctgcggggcggcagcggttgctaattccattcttgcttttatcgaacagggcgatcatgtgttgatgaccaacaccgcctatgaaccgagtcaggatttctgtagcaaaatcctcagcaaactgggcgtaacgacaagttggtttgatccgctgattggtgccgatatcgttaagcatctgcagccaaacactaaaatcgtgtttctggaaagcccaggctccatcaccatggaagtccacgacgttccggcgattgttgccgccgtacgcagtgtggtgccggatgccatcattatgatcgacaacacctgggcagccggtgtgctgtttaaggcgctggattttggcatcgatgtttctattcaagccgccaccaaatatctggttgggcatagtgatgcgatgattggcactgccgtgtgcaatgcccgttgctgggagcagctacgggaaaatgcctatctgatgggccagatggtcgatgccgataccgcctatataaccagccgtggcctgcgcacattaggtgtgcgtttgcgtcaacatcatgaaagcagtctgaaagtggctgaatggctggcagaacatccgcaagttgcgcgagttaaccaccctgctctgcctggcagtaaaggtcacgaattctggaaacgagactttacaggcagcagcgggctattttcctttgtgcttaagaaaaaactcaataatgaagagctggcgaactatctggataacttcagtttattcagcatggcctacagctggggcgggtatgaaagcttgatcctggcaaatcaaccagaacatatcgccgccattcgcccacaaggcgagatcgattttagcgggaccttgattcgcctgcatattggtctggaagatgtcgacgatctgattgccgatctggacgccggttttgcgcgaattgtataacattgccacttttggacaattttgcagacattttattgtgaaaagtcttaaattgttgcgtccgggatcaaggcgtcccggacgattcaggagtacaataggcagataaaggcttaaacgctgttccacaggaaagtccatggctgttattcaagatatcatcgctgcgctctggcaacacgactttgccgcgctggcggatcctcatattgttagcgttgtttactttgtcatgtttgccacgctgtttttagaaaacggcctgctgcccgccagttttttgccaggcgacagcttgttgatactggcaggcgcattgattgcccagggggttatggattttctgcctacgattgcgattctgaccgccgcagcaagtctgggctgctggctaagttatattcaggggcgctggttagggaataccaaaacggtgaaaggctggctggcacagcttcctgctaaatatcaccagcgcgccacctgcatgtttgaccgccacggtctgctggcgctgctggctggacgttttcttgcatttgtccgtacgctgctgccaaccatggcgggaatttccggtctgccaaaccgccgcttccagtttttcaactggttaagtggattgctgtgggtcagcgtggtaaccagttttggctatgccttaagtatgattccgttcgttaaacgccatgaagatcaggtaatgacgttcctgatgatcctgccaattgccttgttaaccgctggcttgttaggcacgctgtttgtggtgattaaaaaaaaatactgtaacgcctgacgattttccccgttcccggttgctgtaccgggaacgtatttaattcccctgcatcgcccgcattcttgccgcatcttcccccggcgtcacaccgaagtaacgtttaaactcacggctaaattggcttgcgctttcatagccgacgcgcatcgctgctgcgctggccttcatgccgtcatggatgatcatcatccgcgccttatgcagacggtaattcttcaaatactgcaacgggctggtactggtgacagacttaaaattatggtggaacgcgcttacgctcatgttggcttctgccgccagttgctcgacgctcaggttttcggtgtatttattctcaatccgtttcagcacgcggctaatcagactgaagtgagtctggcgactgaccagcgccagtaacgcgccgccgcaaggtccggtcagcacgtagtacagaatttcgcggatgatctgtttgccgagaatacgcgcatccagtggtcgctccatcacgtcgagtaaccgctccgccgcgcataaaatctcttcacttaacgtggcggagttaatcccgctggctgccatgctcggctggaaatgctcatcttcgccaatgtccatcaacagttcctgtaactgcaaaatatcgacattgagacgcaaccctgccagcggcacctcactcgtggcataggtttcgcactcaaacggcaacggcaccgtcagcagcaggtattcattggcatcataacgaaacacgcgttcattgatataaccgattttatgcccggaaaagagaattatgatgccaggctcgtacatcaccggtgtacgtgcgaaaggcgtctcgccatacaacaaacgcacatcgggcaacagtccactcaaactattttctttatttttcagtttattaactttatccgccagcaagcggcaaatctcttcacgtttcatatcgcgtaatttcttaggaataatgcggcaattactttgtgcgcaattttgtagcatttctccagcactctggagaaataggcaagacattggcagaaatgagcattgagagccagggcgctggcgatcacaatgaaaaacatcaggcagatcgttctctgccctcatattggcccagcaaagggagcaagtaatgaacaactttaatctgcacaccccaacccgcattctgtttggtaaaggcgcaatcgctggtttacgcgaacaaattcctcacgatgctcgcgtattgattacctacggcggcggcagcgtgaaaaaaaccggcgttctcgatcaagttctggatgccctgaaaggcatggacgtgctggaatttggcggtattgagccaaacccggcttatgaaacgctgatgaacgccgtgaaactggttcgcgaacagaaagtgactttcctgctggcggttggcggcggttctgtactggacggcaccaaatttatcgccgcagcggctaactatccggaaaatatcgatccgtggcacattctgcaaacgggcggtaaagagattaaaagcgccatcccgatgggctgtgtgctgacgctgccagcaaccggtagtgaatccaacgcaggcgcggtgatctcccgtaaaaccacaggcgacaagcaggcgttccattctgcccatgttcagccggtatttgccgtgctcgatccggtttatacctacaccctgccgccgcgtcaggtggctaacggcgtagtggacgcctttgtacacaccgtggaacagtatgttaccaaaccggttgatgccaaaattcaggaccgtttcgcagaaggcattttgctgacgctaatcgaagatggtccgaaagccctgaaagagccagaaaactacgatgtgcgcgccaacgtcatgtgggcggcgactcaggcgctgaacggtttgattggcgctggcgtaccgcaggactgggcaacgcatatgctgggccacgaactgactgcgatgcacggtctggatcacgcgcaaacactggctatcgtcctgcctgcactgtggaatgaaaaacgcgataccaagcgcgctaagctgctgcaatatgctgaacgcgtctggaacatcactgaaggttccgatgatgagcgtattgacgccgcgattgccgcaacccgcaatttctttgagcaattaggcgtgccgacccacctctccgactacggtctggacggcagctccatcccggctttgctgaaaaaactggaagagcacggcatgacccaactgggcgaaaatcatgacattacgttggatgtcagccgccgtatatacgaagccgcccgctaagctttttacgcctcaaactttcgttttcgggcatttcgtccagacttaagttcacaacacctcaccggagcctgctccggtgagttcatataaaggaggaacgtatggctaatccaaccgttattaagctacaggatggcaatgtcatgccccagctgggactgggcgtctggcaagcaagtaatgaggaagtaatcaccgccattcaaaaagcgttagaagtgggttatcgcagcattgataccgccgcggcctacaagaacgaagaaggtgtcggcaaagccctgaaaaatgccagtgtcaacagagaagaactgttcatcaccactaagctgtggaacgacgaccacaagcgcccccgcgaagccctgctcgacagcctgaaaaaactccagcttgattatatcgacctctacttaatgcactggcccgttcccgctatcgaccattatgtcgaagcatggaaaggcatgatcgaattgcaaaaagagggattaatcaaaagcatcggcgtgtgcaacttccagatccatcacctgcaacgcctgattgatgaaactggcgtgacgcctgtgataaaccagatcgaacttcatccgctgatgcaacaacgccagctacacgcctggaacgcgacacacaaaatccagaccgaatcctggagcccattagcgcaaggagggaaaggcgttttcgatcagaaagtcattcgcgatctggcagataaatacggcaaaaccccggcgcagattgttatccgctggcatctggatagcggcctggtggtgatcccgaaaagcgtcacacctagtcgtattgccgaaaactttgatgtctgggatttccgtctcgacaaagacgaactcggcgaaattgcaaaactcgatcagggcaagcgtctcggtcccgatcctgaccagttcggcggctaacatgcaaattctcccggtggcggtaatgttccgctaccggacttttcagaaatcatttattcccctcgcgtcccgcccgttgttactcttccttgttcaggaatgccaaatataaggacatcatcatgcagagccggaagctcttaaaagaacaactcatctatatccgggataaacgcaacggagaggtgaaaaacagatgaaaataatacttctgtttttagcagccctggcaagttttaccgtacacgcacagccccccagtcagaccgtagaacaaacagtccggcatatttatcagaactataaaagtgatgccactgccccttattttggtgaaaccggagagcgggcgataacttctgcgcgtattcaacaggcgcttaccctgaacgacaatcttacgctgccgggcaatattggctggctggattatgatccggtttgtgattgtcaggattttggcgatctggtgctagaaagcgttgcgataacccaaactgacgccgatcatgccgatgccgttgtgcgctttcgtatctttaaagatgataaagaaaagaccacgcagacactgaaaatggtggcggaaaatggtcgttgggtcattgacgatattgtcagcaatcatggcagcgtcttacaagcagttaatagcgagaatgaaaaaacgctggccgctttagctagcttgcaaaaagaacagccggaagcctttgttgccgaactctttgaacatattgctgattatagctggccgtggacgtgggtggtttccgactcttaccgccaggcggttaatgccttctataaaaccaccttcaagacggccaataatcccgatgaagatatgcaaatagaacggcaatttatttacgacaatccgatctgttttggcgaagagagcctatttagtcgcgttgatgaaattcgagtcctggagaaaaccgccgattccgcccgcattcatgttcgttttacgctgaccaatggcaacaacgaagagcaagaactggttttacagcggcgcgaaggcaagtgggaaatcgctgattttatccgcccgaacagcggcagcctacttaagcagattgaggcaaaaactgccgccagattaaagcaatgagctgaattaaataacaattagccggaacaataaataaaagggaacactatatgaaaacgattttcaccgtgggagctgttgttctggcaacctgcttgctcagtggctgcgtcaatgagcaaaaggtcaatcagctggcgagcaatgtgcaaacattaaatgccaaaatcgcccggcttgagcaggatatgaaagcactacgcccacaaatctatgctgccaaatccgaagctaacagagccaatacgcgtcttgatgctcaggactattttgattgcctgcgctgcttgcgtatgtacgcagaatgataaaaaaatccccggtagcgtgtcagttgccggggatattttttaacgtccaaccgccgctttaggccgtttcttcgcaccagcattcaccggacgagattgcgtagagctcgctttttttgccgtagcaggcgtctgacgctgggtcgccatcggcgtatgtttcgtcaacgccggacgggtattgcggttctggcgacgagcttcacgcatctcttcaatggttggcgcaggcactaagcaatcgcgacggctgccaatcagatgctttttgcccatcgcttccagcgcctggcggattaacggccagtttgccggatcgtggtaacgcaacaacgctttatgcaaacgacgctgtttgtcgcccttcggtacgaagacgtcttcgctcttataaccaatcttcgccagcgggtttttcccggtgtaatacatggtggtactgttcgccagcgggctcggatagaagttctgcacctggtcgaggcggaagcggtgctttttcagccacagcgccagattcaccatatcttcatcacgcgtaccggggtgcgcggagatgaaataggggatcagatactgctctttacctgcctgtttactgtaagtatcgaacagctctttaaagcggtcatagctgcccatgcccggcttcatcatcttgcttaacggcccttcttcggtatgttccggggcaatcttcagataaccgccgacgtgatgggtcgccagttctttgatatagcgcggatcttctacggctatgtcataacgcacaccagaggcaatcaggatctttttaatgcctttcagatcacgcgcacggcgatagaggttgatcgttggttcgtggttcgtgtccatgtgcggacaaatatccggataaacgcagctcaaacggcgacaagtttgttcagcgcgtgggcttttgcagcgcaacatatacatgttggcagttggcccaccaagatcggaaatcacgcccgtaaaacctggaacggtgtcgcggatcgcttcgatctcattaatgatgctatcttcggaacggctctgaataatgcgcccttcgtgctcggtgatagaacagaaagagcagccgccaaagcagccacgcataatgttgacgctaaaacggatcatttcgtaagccggaatacgggcattgccataggccggatgtggcacgcgcttgtatggcagcgcaaaaacgctgtccatctcttcggtagaaagcggaatagcaggcgggttgatccacacatagcggtcgccgtgtttttgcatcaatgcgcgggcacagcctgggttggtttcgtggtgcagaatacggctagcatgggcgtacagcactttatcgcccttcactttctcgaaagaaggcagcaacacgtaggttttttcccacggtttcgggcgcggtggctgcacggttacggctttggcttcctgctttttcggtgccaccggtttgttatccgcgcacggcaaatcttcaccatacggatgcgggattgggtcgatttttccaggggtatcaagacgggtggaatccacgccgctccagccaggcagcgcctctttcacgataatcgcggtattacgcacatcgcggatttcactaattggctcgcccatcgccagacgatgcgccacttccaccagcggacgctcaccgttaccaaacatcagcatgtcggctttgctatccaccagcacggaacggcgcacggtatcggaccagtaatcataatgcgcggtacggcgcagactagcctcaataccgccgaggatcaccggtacatctttccacgcctctttacaacgctgggtataaaccagtgtggcgcgatccgggcgcttacccgcgacgttatccggcgtgtaggcatcgtcatgacgtaaacggcgatcggcggtataacggttgatcatgctatccatgttgccagcagtaacaccgaaaaacagattcggtttacccagacgcataaagtcgtctttgctgctccagtccggctgggcgatgatcccgacgcgaaagccctgcgcttccagcatacgaccgcaaatcgccatcccgaagcttgggtgatcgacatacgcgtcgccagtaaccaaaatgatgtcgcagctatcccagccaagttgatccatctcttcacgagacatcggcaaaaacggtgccggtccaaaacaggcggcccagtactgcggccaggagaacaggtcgcgatccggttggatcagggagatagagctcattttgcttccagaaatgataaaaaaataatcaaaggccggggattataagccggaacgaaagagaaatcgaaaggtattccatactcgccctcctcgggcgagtatgaagattacggtaccggattgaccaacagttgcccaatgctgccacggtccgccatttccagcgtctgactgttgaagtagaacgggaagtgcgcccaggaaggctgaccgaaataaacaagcagctccacttgtccgtcaacccaaacggtatctttccagcctctgtcttccgggaacggcatcgcgccattcacgttacggatctggaacattacgccttcaatatggaacgcttgcggctcgtccgcgcgtaccgtccagcgttcccacgttccttgctgcgcggtgacatcaatacggttgacgtcccacagctgtccattaatacccgggtcatcacccagactgatatcgcgactgcgaattgggctaccagccatgatttcagttggcagcaagcgcatcggaagactgtctgtgaccagcggcagaaggccggttgggcgcagcgttagcaccagggtagaaaccagaatactggatggctcaaagaagccacgaatacgatcaacaatgctcgccgcttcgccacaggtgatgctcacttcatcgccgttgctcatatccaccagaatctcgcggcgctcgcccggtgccaggctaagttgcttcacgcttacaggagcaggcaggaatccctgatcgccagaaatcacatgtaacgggcgaccatcgttcatctgtagttgatagcgacgagagttgctcgcgttcagcagtcgcaagcgcacccagccacggctgacttcaacgtacgggctttgtacaccgttaaccagcagcgtatcaccaacaaagccgccgcttcccggttcgttgtattctggcgtaccaaagttatccagccgtttatcctggataatgaccggaaaatcatccacaccataatggttggggataggcaggctcttgctgacttcatcttccaccagccacattccggcaaggccgttatagacctgctgagccgtgcggttgggagtattggcgtgataccacagagtagctgcgttctggcgaatgggcagtacgggtgcccagtcagcgtttgggctcatcatccgtgccggaccgcccatcagcgggcctggtacctgtagcccggccaccgtcatactgacattttctgtcaggcggttgctgtaaataagcttaacatcgtcgcccttccagacgcggatagtcggccccaggtaacgaccattgattccccagacgctcgcgcgtgtccctggcgtaaaactccagtgcgcacgttgtacagtcataaacagcggttgcccacggcgagattcaagtagcggcggaacgggtagcggttgctgttgcccggctgcgctggccttcaggggaacagcgcctgcacaaagtgcaatcccgcttgcctgaatgaactgacgccgactgagactcatatttgctccatgtaaaactggctaaagtaataccgtgcaggaaagtgttccccgcaaaaatacagattgccgacttaaacttttccggcggcttcgcgttctgcgacttctttatcgagctcggcgattttttgttccattatgctacgacaatgggcagccagctcacgaacctgatctttgccatactgactgacgtcaattggcggcagcatttcgacaatcaccagaccgttgtgcagtcgattaagattaatcttattgctagttgtagagacgcacacgggaataatcgggacgcccgccgcaattgccgcgtgaaatgctccagtcttgaacggtagcaggccgcgaccacggctgcgggttccttccgggaacatccagatggaaatacggcgttttttgaagtgattcactacttccgcaatggtgccgtgagctttagtgcgattgtttctgtcgatcaataagttgccggttaaccagtacaactgcccgaagaaggggatccacagcaagctctttttacctaccgtcaccgtcggcggttgcacgatgttgcttgctgtcaccatgtcatagttgttctggtggttagcgatatagatagcattgccgtagctttcagcgtctgtaggtttacggcactcaactttcaggccaaacagcggcgcaagacggccaaacatatgcccaaaggtggccacatgtttcgggttacgcgggctgaaaaggcagtaaatggagccgaatacacagactaagatgctgtaaatcacggtaataataagacgaaagatatatagcataacaccctctgaaggtctgagagactggcattgtacgtcacctgaaatcaggttagggcattgttaaaagccgctctctggaaaagcgtattgttaatcgcaacgcatgaataaacaacggtttcaagggaatttttatcgtttccgggggttgaatacgctgccggatgacgacttaacgtttcatccggcgttccttgcaagcgggaggaaacagcgccctccccggcatattactcttcgctatcaccgctgctggcacggcgaggagagtcgatctcaacacgatcgatacgctgcaaaccgcgcatcaacgtaccgcggcgtccacgttcgccagtgactttctgtaactcttccgggcgcagtttaattttgcgtttcccaacatgaatggtcagcgtgctttgcggcggcagaacgtacaattgcgccagaccatcttctccacgcgcggcttctgcgcttggaatgttgataatcttgttgcctttgcccttgctcagctgcggcagatcacttaccgggaacatcaacatacggcctgcctgagtgattgccagcagcatatcggaagcatcttcaatcaccaccggcggcataacatgggcattttccggtaaggtgatcaaagccttacctgcacggttacgcgccaccagatcgttaaaggtgcagacgaaaccgtaacccgcatcggaagccatcagcagtttctgatcgtcgctttccatcagcatatggtcaacggtcgccccaggcggcaacgttaatttgccggtgagcggctcgccctgaccacgcgcgctcggcagcgtaatcgggtcaatggcatagctacgaccggtggaatcaacaaacactaccggttggttgctcttacctttcaccgccgctttgaagctatcacccgctttataattcaggcccggcgcgtcgatatcatggcctttagcgctgcgtacccagcccatctggctcagcacaatggtgacaggttcagacggcagcatgtcgtgctcgctcatcgctttcgcttcttcgcgttcctgcaacgggctacgacgatcgtcaccgtaggcttgcgcgtctgcctgcagttctttcttcagcaggttattcattttacgctcggaagccaaaatgccctgcaactggtcgcgctctttttccagttcactctgctcaccgcgaatcttcatctcttccagtttggcaagatgacgcagtttcagttcgaggatcgcttccgcctgggtttccgtaaggccaaaccggctcatcagcgccggtttcggttcatcttcattacgaatgatctcaatcacttcgtcgatattgagaaacgccaccagcaaaccttcgaggatatgcaggcgcttgaggactttctccagacgatagttcagtcggcggcgcacggtatcgcggcggaacaccagccattcggagaggatttccagcaggtttttcaccgccggacgaccatccagaccgatcatattaaggttaatacgatagctcttttccagatcggtggtagcgaagaggtggttcatcacctgatccatatccacgcggttggaacgcggcacaatcaccaggcgggtcgggttctcgtggtcagattcatcgcgcagatcgtcaaccatcggcagctttttgttgcgcatttgcgcagcaatttgctccagtacgcgcgcaccactaacctgatgcggcaatgcgctgataaccaccgcgccatcttctttcttccacaccgcgcgcatacgcacactaccacgtccgttctcgtagattttacggatctcggcgcggctagtgataatttccgcttcagtcggataatccggcccctgcacgatatccagcagctgatcgagcgtggttttcggctggtcgattaatgcgattgccgcctgagccacttcacgcaggttatgcggtggaatatcggtcgccatgccgacggcaataccggtggtgccgttaagcaaaatgtttggcagacgggcaggtagcattttcggctcctgcaaagtgccgtcgaagtttggcacccagtcagccgtcccctgccccagctcgctcaatagcagctcggaatatttgctcaaccgggattcggtgtaacgcattgccgcgaagcttttcggatcgtccggcgcgccccagttcccctgaccatcaaccagcggataacggtaagagaacggttgcgccatcaggaccatcgcttcataacaggcgctatcgccgtgcggatggtatttacccagtacgtcaccgacggtacgggcgctttttttaaatttggcgctggcattcaggcccagttcagacatcgcatacacaatgcggcgctgaacaggtttcagaccatcaccaataaacggcaacgcacggtccatgatcacgtacatggagtagtttaagtaggcgttttccgtaaattcatgtagcgcaaggcgctctgccatatcgctcattaattctgattcctcaacttattcgccagccttcaaaggggcaatattgccggagatactacattatctgccgcgtcgagtcacaggagatcaacgtgaatagcgccgccggacgtgctccgacggcgataaaggcatcaatgtgccttgatatacaactctttgctgtagacataatcctggggattatgcagcggaaaaccgccaacgtagggtttaagcagtttgattaacggctgatagtagataggaatcagcggtgcctgttggttgatgatcacttctgcctgctgatacaacgcattacgctttgtcgcatcagtgatctgcgtggcctggtttagtaaggcgtcatactgcgcatttttccagtgaccgacgttttcttcactatcgcttttgagcgtgttcaggaagctggaagcatcattgtacgtcgcatcccagctctgccgagacagcatgaaatcaccggctcgtcgggcatcaagataggttttccactccattgtgcgcagcgtcacctgtgcacccagccattttttccattcggaagacaacgctatcgcggtcttttcatgcagatcgtacttgttgtagaacagctcaaagcgtagcggatgagaggcgtcgtatcccgcctgtttcagcaaggcttttgccatcgcgacgcgctcactcattggcttttgcagttcatcgaacgtcgtcgcgctaaagccttttacctctggcggcgtcagcgtggttgcgggcgttctcaaccccagtaccttttgcgcaataagctgtcgatcaaccgtaagatatagcgcccgacgcactcgcacatcgttaaatggcggtttctcaaggttgaagttgtaatattcgctgttcagacgcggaataattcgtagctcgccaggcagacttttttcaatggcgggaatttgctgcgccggaacccaggtgagatcgacctctcccgcgcgatagcggttatagccggtgacgctattatctagcgccagatactcaacctgttgcaatactgtatgttgcgcatcgcggtactttggatttttgcgtgcagtaatcttttcgttaactacccactgatcaagcacaaaggcaccgttgtaaaccatgttctctggcttactccagctatcgccatgtttagcgatgacatgatgaggaaccgggaacagcgtcggccaggcgagcatcgtcgtgaaccaaggaaccggctgctcaagcgtaacttcaagagtacgatcatccgtcgctttgacacccaggcttgtaacatctgctttacccgcaacaatagctgcggcattgttaatgtgcgcctgtgccagatagccagcaaaagggcttgccgttttcgggtcaaccgcgcgctgccagccgaggacaaaatcctctgccgtcagaggctgaccgtcggaccactgcaaaccgctacgcagatggaaaatatagcgcttgccgccgtccagtatctcccagcgttcagcctgagcgggctgcacctggccttcaccgtccatccataccagaccttcaaacagatccagcacaatctgcgcggcagtattctcctccaccttttgcgggtcgagcgtacctgggtcgctatgattgttgtaacgaaagacttgttgcggggcgagcggtgtgttggcgggaacgtcagcagcgtagagaggagccgcacttaccaggctgaccagccataataaatttcgcgtatacatggtattccttaccggagaaattataagcccaacaacaatacgcctgtggcattgttcgctcaaacttatcgcgagtgatttggctcacactccggtaaagaaaaaagcgagttgcccccgcttttccattaattaacggatttcattcaatagttctggatgcttatccagaacacgtaaaagtttgattgtggaaggatgaggttgggcattgcctttttcgtaacggctaaacgcatttacacctcccccaaaaatttcgcttgcctctttttgggtaagagagagcttttttcgaaccttcactataaattcaggtgccactgtttcggcattcacgctagcccgaaatgcctttacttgcgccatgaaagcatcactctcttctttattcatgatgctctcttcgcaatggacacaatataaaccgtggatacctttcaatactgtttttcgtccacggaaggtgtatggaatatctttaatgccagaaaccatttctccctggtggcaaaccggacatttcatattacttctccttaaagctgacgatcagtacgtcatgaattaccgtaattttaagataaacctggcctgtaacaagcctgggtctgtaaacatcctgccagatagtatgatcagagtaggtggtcatgcttttataaaagtcgctctcacttaatccaatgataacattacacataccatcaaaatccaaacctaactcatctgcatttaacagggcactacgtgttgtacgaacttgcccggcattgacaagttttttaacctgactcaaacgtgtatgtggtgtgcgtttttccataacccccgcctccctgttactttagttataacctaaaaggttaattacagcaatgaaaaagcacctaaaaggttagttagatgtacggagatagtgaccacacaaaacgtattctttaaggaaagtgattgaccatataagaaagtggcgcattagtagcgccagtttgaagcaggaatttataagggaagctggagtcaggcatcacgccaacggcacataaacatccgtttccagtcgctgctctgtcaccccttcggcaagattggtgtagtgaaacagaatcggtgctttacgcattttctcgccgcttgcaggcagccagtggcgaatgatgccccataccgtgtgactaatatcgtccagctcgccaacgtggcgggccacggcataacgtccaccggtaagttcaccattgctcacaccataacgattatcgggaatcggttcgctaacgctgccgcagatatcaaagcgaaacgcttccggtgcggtggtggcagggtcgtcccaggcgacgccaaaagtctggctttggttaacaggagaaagccccgtctctttacgccacatgataaatttcgccacgctgtagttgagcaattcagggctacagcggtgcggcaacatcgccacaggtatacttgggaaatcgataatgtttacatccagtgtcaggtttgtcattttgcctccctgcgaaattattcccgggaacgcgtcccgggagcggtaacaattacggatttactttgcggatctgtttgacgtcaatttcaacagaattccagtctttatcgacttcaccctgaatctcaaccgtatctttcggcgtcaccgtcacgccgttccagcgtttgtggtcgatatcaacattgatagtaccgctggcatctttgaacacgtagagatcgtcagagatgcgttcaacgatattgccgcgcagggttacccaggtgtcgtcacgcagggattttgcgctttctacagtcgttacgctgccgttcggcccctggaatcctccggcctgactttgcgttgcgcttgggccagaaaaaccgccctgctctgctgccatcaccggtgcgctgcacagggccattactgcgattactgctgcgaattttttcatgtttattactccctttaatgtctgtttccgagcatttaacaagatagtccttaacaacttcttaagggaaaaaaataaaatttagtgctgtacagagcgcgttacaacacggtttactggcagcaaatacggttatcgcagggatgaaaaaatgcgaattttactgatagaagatgacatgctgattggcgacggcatcaaaacgggccttagtaaaatgggttttagcgtcgactggtttacacaaggtcgtcagggaaaagaggcgctttatagcgcaccttatgatgcggtgatcctggatttaaccttaccaggcatggatggtcgcgatattttgcgcgaatggcgagaaaaaggtcagcgtgagccggtactgatcctgaccgcgcgcgatgcgctggcggaacgtgtagaagggctgcgtctgggagctgacgattatctgtgtaaaccttttgcgttgatagaagtcgccgccaggctggaagctctgatgcgccgaaccaacggccaggccagcaacgagctgcgccacggtaacgtcatgctcgaccccggcaaacgtatcgccacgctggctggcgaacccttaacactgaaaccaaaagaatttgccctgctggaattactgatgcgtaacgctggtcgggtactgagccgcaaactgattgaagagaaactgtatacctgggacgaagaggtcaccagtaatgccgttgaagtgcatgtgcatcatctgcgacgcaaactcggtagtgattttattcgtaccgtgcatggtattggttacacattaggtgagaaatgaaatttacccaacgtcttagtctgcgcgtcaggctgacgctaatctttttaattctggccagcgtgacctggctgctttccagctttgtcgcctggaaacaaacaacggataacgtcgatgaattgttcgacacccaactgatgctgtttgccaagcggttaagtacgctcgatctcaacgaaatcaacgcggcggatcgcatggcacagacgccaaatagattaaaacacggtcatgttgatgacgatgcgctgacctttgccatctttacccacgacggcagaatggtccttaatgatggcgataacggagaagatattccctatagctatcaacgggaaggttttgctgacgggcaactggtcggtgaagacgatccttggcgttttgtctggatgaccagtcctgatggcaaatatcgcatcgttgttggccaggaatgggaataccgtgaagacatggcgctggcgattgttgccgggcaattgatcccgtggctggtcgcactgccgattatgttaatcatcatgatggtactactgggtcgtgaactcgcgccgctgaacaaactggcgctggcactacgtatgcgtgaccctgacagcgaaaaaccactaaacgcgactggcgtacccagcgaagtgcggccactggttgagagcctaaatcaactgttcgcccgcacacatgcgatgatggttcgtgaacgacgctttacctccgacgcagctcacgaacttcgtagcccgttaacggcgctgaaagtgcaaaccgaagttgcgcagctctctgacgatgatccgcaggcgcggaaaaaagcactgctccaattacattccgggatcgatcgcgctactcgtctggttgatcaactgctcacgctaagccggctggacagtctggataaccttcaggacgtcgcggagatcccgcttgaagatctcctgcaaagcagcgtgatggatatttaccacacggcgcagcaggcgaaaattgacgtgcgactgacactcaatgcccacagcatcaaacgcaccgggcaaccgctattgctaagtttgttggtgcgaaatttgctggataacgccgtgcgctacagtccacagggcagcgtggtagacgtcacgctgaatgctgataatttcatcgtgagggataacggccccggtgtgacaccagaggcactggcgcgaattggcgaacgcttctatcgcccacccggacaaaccgctaccggcagcgggcttgggctaagcattgtccagcgaatcgccaaattgcatggcatgaatgttgaatttgggaatgcggaacaaggtggatttgaggcgaaggtaagctggtaacttctctgtctatgagagccgttaaaacgactctcatagattttattaatagcaaaatataaaccgtccccaaaaaagccaccaaccacaaaccagacaaataccgaggctgaatacatatacccaaaactcgaacatttcccgcataaagagttttcttaagataagaataataagtggcgtaagaagaaaaaatgctgcaatcattgcttgcaatatacgatcttcgccactaacggaaggtatactgcaaatatttcctccgctctcaagcatccagtcatacttattgaaagcaaaaaaagaatctattaaccaataagtaagcattatatatagcaatgcttcaaatattgttttaattttctgctttaacatatatcagtacgctcataaaaatccatttataattatcaacatgacacgttgatactttcatcttttacttattcaaagccatattttcaatccccaaaaaaaccgaaccaaacgtgtaaattattccggtgcgagtaagaattatgaggaatggctatcagtattgtcattttcagaaaatatttatcctgcatcggtgagtcagagtaagatcagacttttgctaaattcgcaaaagactttgcacattttgctaatttcaccgtaccgctctgtgacgtactatagtcggcaaacgtctcaccttgaggttaaaaaatgagcaacatcctgattatcaacggcgcgaaaaaattcgcccactccaatggtcaactgaacgacaccctgaccgaagtcgcggatggcacactgcgcgaccttgggcatgatgtccgcatcgttcgcgccgacagcgactacgatgtcaaagcggaagtacaaaactttctctgggctgatgtggtgatctggcagatgccaggctggtggatgggcgcgccgtggacagtgaaaaaatacattgatgatgtattcaccgaaggtcacgggacgctgtatgccagcgatggtcgtacccgcaaagatccgagcaaaaaatacggttccggcggcctggtacagggcaaaaaatatatgctttctctgacctggaacgcaccaatggaagccttcaccgaaaaagatcagttcttccacggcgttggcgttgacggtgtgtatctgccgttccataaagcaaaccaattcctcggtatggaaccgctgccgacatttatcgctaatgacgtgataaaaatgcctgatgttccccgctatactgaagaatatcgcaagcatcttgtggaaatttttggttaactagagctcaggctttagaaggagttaaccatgcttaccgtaatcgcagaaatccgtactcgtcctggtcaacatcaccgtcaggcggtattggatcagtttgctaaaatcgttccaaccgtactgaaagaagaaggttgccacggctatgcgccaatggtggattgcgcagctggcgtgagtttccagtctatggcaccggattctatcgtgatgattgagcagtgggaaagcatcgcgcatcttgaagcgcatctgcaaaccccgcacatgaaggcgtatagcgaagccgtaaaaggtgacgtgctggagatgaatatccgtattctgcagccagggatttaatcctgccttgtttgcccggccatcctgaccgggcaatgttctttcctttaaacctcaatctccgccatgtcgcctttctcttgcaaccagttgcggcgatcttcgctgcgtttcttcgccagcagcatatccatcatcgcgtcagtacgctgatcgtcttcatcatcgatagtcaactgcaccagacggcgagtgttcggatcaagcgtggtttcgcgcaattgcatcgggttcatttcccccagacctttaaaacgctggacgttcggcttgcctttcttgcgttttaattgctcaagtacgccctctttctcttcttccgtcagcgcgtaataaacctctttcccgagatcaatacggtagagcggtggcagtgcgacgtaaacgtgaccgtgtttcaccaacgcgcggaaatgttttacgaacaaagcgcagagcagcgtggcaatgtgcagaccatcagagtccgcatccgcgaggatacagattttgccataacgaagctggctcagatcgtcgctgtcaggatcgataccgatcgctacgctaatatcgtgcacttcctggctagccagcacttcgtcggaagagacttcccaggtgttaaggatcttacctttcagtggcatgatcgcctgatattcgcgatcgcgcgcctgcttggcagatccgcctgcggagtcaccttccacaaggaacagctcggtacggttaaggtcctgcgcggtacaatcagccagtttgccaggcaacgccgggccgctggtcagctttttacgcaccacttttttggccgcacgcatacggcgctgggcgctggaaatcgccatctccgccagcagttcagccgcctgaacgttctggttcagccacaggataaaggcatctttcaccacgccagaaacgaatgccgcgcattgacggctagagagacgctctttcgtctgcccggcaaactgcggatcctgcatttttacactcagcacataggcgcagcgatcccagatatcttccgcgctcagctttacaccgcgcggcagaatattgcggtattcacagaactcacgcatcgcgtccaacaggccctgacgcagaccattaacatgggtaccgccctgcatcgttgggataaggttgacgtagctttcggtcagcagttcaccgccttccggcagccacagtagcgcccagtccacagcttcagtatcaccagcgaaattaccgataaacggtttttccggcagcgtcggcagaccatttaccgcttccgccaggtaatcattcagaccgtcctgatagcaccagcgttgttcggtattgttgatctcatctttaaaagtgatctcaacgccagggcacaataccgctttggctttcagcacatgcgtcaggcgactaacagaaaatcgcgggctgtcaaagaaggtttcatccggccagaagtgcacactggtaccagtattgcgtttaccgcaagtgccgacaacctgtaaatcctgcaccttttcgccattttcaaaggcgatgttataaacctgaccatcgcggcgcacgttaacttctacgcgcttgctcagggcgttaaccacgctaatccccacgccatgcaggccgccagagaactggtaatttttgttagagaatttaccgcctgcatgcagacggcaaagaatcagttcaaccgccggtacaccctcttccgggtgaatatccaccggcatcccgcgcccatcgtcaataacttctaagctctggtcagcatgtaaaataacgtccacgcgttttgcgtgacccgccagtgcttcatccacactgttatcaatgacttcttgccccaaatggttagggcgagtggtatcggtatacatccccggacggcggcgaaccggctcaagcccggtgagtacctcaatggcatcagcgttataagtttgcgtcatggtttaagttagtaattcgagttgatcgtcagagatggtgcagaccaagaaaatcgacgatcgggttgaaataatcttcgaagcccgtgaatgcgtggttgccgccttctatgacagtctggcggcaggaagcgtagtacgccaccgcctggcggtaatccagcacttcatctcccgtctgttgcagcagccagatcaaatccggcgcttccagcgggtcaatctgcatgactttaagatcgtaaatatggcgactctctagcacatattgctgcccggtgtaggggttctcgttctgaccgagatagtccgtcagcagttcaaacgggcgcaccgccgggtttaccaccactgcgggcagcataaaacattgactcaaccaggtggcgtaatatccccccagactgctaccgacaatacccaggctatcaccgccatgttccaggacaatggattccagcagctctgccgcgtcggaaggatacggcggcaactgcggaatgatcatctcaacgtcagggtgatgttccgccagccagttttttaacaagctcgcttttgcagagcgcgggctgctgttgaaaccgtgtaaataaagaagcgtagacatcagtagccttcactagcggtatcaggttggaaacgtgtgtccgccaggcgatgcacctcggtggtcagcgtgccatcagcatgtaactcgagagtacgccagccgggcgcgatggtatccagcgtaaagttggaacagtgcggcttaaactgcacacaggtgctcggcgttgccagcaggcggcgaccattccagtcgagatccagctcctgatgaatatgaccgcacagcaagtatttgacgtgcggaaacttcgccagcacggtatccagttcgcccgcgttacgcagactgtgttgatcgagccaactacaacccgcaggtagcggatgatgatgcagcagcagcaacgtatggcgttctggcgcatcggccagtttacgttccagccactcaagctgaaactcgctcagctcaccgtgcggcacgccaaacacctggctatccagcaacaggatttgccattgctcaccaataaacacgcgcttcgccggggagatacccgcatcctgtaacgcgctgtacatcgcgggctggaaatcgtggttgcccggcagccagacgcagggcgcacgaaaacttgcgatgccttcagcgaaatgctgataggccgcagaggattgatcctgcgctaaatcacctgtcgcgacaatcaggtcgaattcgtgctggtgtggccgaatcgcctccagcaccgcctggtaactctcccaggtgtttacccctaacagggcttcgtgcttttgtgcaaacaggtgagtgtcggtaatttgtaaaatcctgactctggcctcaccagccagaggaagggttaacaggctttccaaatggtgtccttaggtttcacgacgttaataaaccggaatcgccatcgctccatgtgctaaacagtatcgcaaccagtccgctaaaaactgattaatttgatgcttttcgtcgcgttgatgcaactttttattaggataatcataccgcgctttgaagcgaaaaatctgctggctactacacacttcagccaccatcgcgtcatgatacagacgcaccgtcatactcggaaggctccagtaactgatcgcgggcgcagtctgttctattgtcaccagggtagtgtatcgggtgctttccacaatcgtcagccgatattgtgcgtttgccacctgatagcttacagtttcgccgggtgcgtcattgcgcggtaacaaacggcgcaattgactaaagttcatctcgcacaggcgcatcatttcaggaaagtcaggtgtgtaacgcttcatttatgcccactcattttttaacgcttgatgatgcagctgcagccattgcaaagcgatgacgctcgctgcgttgtcgattttcccctcttctacccactggtatgcctgttcccggcttaccacatgaacgcgaatatcttcgttttcatcagccagaccgtgaataccgcttgcggtcgtggcgtccacttcgcccaccataatactgctacgctcactggtgccccccgggcttgccaggaaacttaacaccggtttggtccgtttgactatcagtcccgcctcttcaatcgcttcgcgacgggcaacatcttccacactttcaccctcttcaatcatcccggcaaccatctccagtagccaaggggtttcgctggtgtcgtacgcggcaatccgaatctgctcaatcagcacaacttcatcacgcactgggtcaaagggtagcaagactgcggcgtgaccgcgctcaaaaatttcccgccgcacctcatgactcatttgcccgttgaatagacgatgacgaaatctataaagatctaaactaaaaaagccgcgataaagtgtttctcgtgcaataatttctacatcgtttttgccaaatgtaacgggcaggttgtctggcttaagcattgttaatgtcctggcactaatagtgaattaaatgtgaatttcagcgacgtttgactgccgtttgagcagtcatgtgttaaattgaggcacattaacgccctatggcacgtaacgccaaccttttgcggtagcggcttctgctagaatccgcaataattttacagtttgatcgcgctaaatactgcttcaccacaaggaatgcaaatgaagaaattgctccccattcttatcggcctgagcctttctgggttcagtagcttgagccaggccgagaacctgatgcaagtttatcagcaagcacgccttagtaacccggaattgcgtaagtctgccgccgatcgtgatgctgcctttgaaaaaattaatgaagcgcgcagtccattactgccacagctaggtttaggtgcagattacacctatagcaacggctaccgcgacgcgaacggcatcaactctaacgcgaccagtgcgtccttgcagttaactcaatccatttttgatatgagcaaatggcgtgcgttaacgctgcaggaaaaagcagcagggattcaggacgtcacgtatcagaccgatcagcaaaccttgatcctcaacaccgcgaccgcttatttcaacgtgttgaatgctattgacgttctttcctatacacaggcacaaaaagaagcgatctaccgtcaattagatcaaaccacccaacgttttaacgtgggcctggtagcgatcaccgacgtgcagaacgcccgcgcacagtacgataccgtgctggcgaacgaagtgaccgcacgtaataaccttgataacgcggtagagcagctgcgccagatcaccggtaactactatccggaactggctgcgctgaatgtcgaaaactttaaaaccgacaaaccacagccggttaacgcgctgctgaaagaagccgaaaaacgcaacctgagcctgttacaggcacgcttgagccaggacctggcgcgcgagcaaattcgccaggcgcaggatggtcacttaccgactctggatttaacggcttctaccgggatttctgacacctcttatagcggtagcaaaacccgtggtgccgctggtacccagtatgacgatagcaatatgggccagaacaaagttggcctgagcttcagcctgccgatttatcagggcggaatggttaacagccaggtgaaacaggcacagtacaactttgtcggtgccagcgagcaactggaaagtgcccatcgtagcgtcgtgcagaccgtgcgttcctccttcaacaacattaatgcatctatcagtagcattaacgcctacaaacaagccgtagtttccgctcaaagcagtttagacgcgatggaagcgggctacagcgtcggtacgcgtaccattgttgatgtgttggatgcgaccaccacgttgtacaacgccaagcaagagctggcgaatgcgcgttataactacctgattaatcagctgaatattaagagtgctctgggtacgttgaacgagcaggatctgctggcactgaacaatgcgctgagcaaaccggtttccactaatccggaaaacgttgcaccgcaaacgccggaacagaatgctattgctgatggttatgcgcctgatagcccggcaccagtcgttcagcaaacatccgcacgcactaccaccagtaacggtcataaccctttccgtaactgatgacgacgacggggcttcggccccgtctgaacgtaaggcaacgtaaagatacgggttatctgccgcattcttcccccttcagccttcaatttcgaccagccatcctctattctgatgggtatttaccactggtcccggaagacaaaaatgaaacggacaaaatccatacgccacgcatcgttccgcaaaaactggagcgcacgccatctgacaccagtcgctctcgcggttgccactgtttttatgctggctggctgtgaaaagagtgatgaaacagtgtctctctatcaaaatgctgacgactgtagtgctgcaaacccaggcaaaagcgccgaatgtaccaccgcgtacaacaatgcgctgaaagaagccgaacgtactgcgccgaaatacgccacccgtgaagactgtgttgctgaatttggtgaaggtcagtgccagcaggcaccagcccaggctggcatggcaccagaaaaccaggcgcaggcccagcaatccagcgggagtttctggatgccgctgatggccggttacatgatggggcgtctgatgggcggcggcgcgggatttgcacagcagccgctgttctccagcaaaaacccagccagtccggcttacggtaaatataccgacgcgacgggtaaaaactatggcgcagcccagccaggccgcaccatgaccgtaccgaagacggcaatggcaccaaaaccggcgaccaccactaccgttacccgtggcggttttggtgaatctgttgccaaacaaagcactatgcagcgtagtgcaaccggtacctcttctcgtagtatgggtggctgataccgatggaaagagtcagtattaccgagcgcccggactggcgtgagaaagcccacgaatacggtttcaattttcacaccatgtacggcgagccgtactggtgtgaagatgcttactacaagttgaccctcgcccaggttgaaaagctggaagaagtcaccgccgaactgcaccagatgtgcctgaaagtggtggaaaaagtgatcgccagcgatgagctgatgaccaaattccgcattccaaaacacacctggagttttgtgcgccagagttggctgacgcaccagccaagcctttatagccgtcttgatctggcgtgggatggcactggtgaacctaaacttctggaaaataacgccgatacgccaacgagtctatacgaggcggcgttctttcagtggatctggctggaagatcagcttaacgccggtaacttgccggagggcagcgaccagtttaacagtctgcaagaaaaactgatcgatcgcttcgttgagctgcgtgaacagtatggcttccagttgctgcatctcacctgctgtcgcgacacggtggaagatcgcggaaccattcagtatttgcaggactgcgcaacggaagctgaaattgctactgagttcctctacatcgatgatatcgggttaggtgaaaaaggtcagttcacggatttacaggatcaggtaatttccaacctgttcaaactgtatccgtgggaatttatgttgcgtgagatgttcagtaccaagctggaggatgcaggcgtacgctggctggaaccggcgtggaagagcattatctccaacaaggcacttctaccgctactgtgggagatgttcccgaatcacccgaacctgctgcccgcttattttgcggaagatgatcatccgcaaatggaaaaatatgtggttaaaccgatcttctcccgtgaaggcgcaaacgtgagcatcattgagaacggcaaaaccattgaagcagcggaaggtccgtatggcgaagaagggatgattgttcagcaattccacccgttaccgaaattcggcgacagctatatgctgattggtagctggctggtgaacgatcaacccgccggaattggcattcgtgaagaccgtgcattgatcacccaggatatgtctcggttttatccacatatttttgttgaataagccacgataccggatggcactcgccatccggtaattgttagcctatctgcacgctcagcatactcaggctgcccatttctataccctcaaccggaatggtaattggctcctgcccatcccacgcacctaacacatacaacaacggcaaataatgctctggcgttgggttgcttaacgtgccaccttcatggtcgaggtaattcaccagaggatgttgttccactggcccttgccacgtcagattcgctttcacatactcattaaagctcgtcgcccacggatacggactactatcaccgtgccacttcactgtgcgcaggttatgcaccacgttaccgctggcgaccaacattattccttcatctcgcagcgctgccagtttgcgccccatttcgaaatgccaggcggcaggtttgctactgtcgatactcaactgcaccatcgggatatcagcgtcaggatacatcttaatcagcacgccccagctgccgtggtcaaagccccaggcttctttatccagcgtcaccgggatcggcgctaacagctcaaccagacgctgtgccagcgcagggctacccggagcaggataatgcgtatcgtacagcgcctgcgggaagccaccaaagtcatgaatcgtgggcggcgtctccatcgcggtcactcctgttccacgggtaaaccagtgagcgctaaccaccacaatcgcttgcgggcgtggcaatgtcatccccaacttctgccagctgcgggtatacaaattatcttccagcacgttcatcggactaccgtgacctaaaaacaatgctggcatacgtgtactagacatgatgatatccttaactaaaggtgtcattttgatatcctcacaatacgcttgttcggcggagtaagaacccggataacaatgatgatgatcatcagttattttgacgatctgcctgaaggtgaagatttataaggagttgtcgatgagtgtacctctcattctgaccatactggcgggggcagccacgtttattggcgcgtttctcggcgttctcgggcaaaaacccagcaaccgcttactggcgtttagcctaggttttgcggcggggatcatgttgctcatcagtttaatggaaatgcttcctgccgcactagcagctgaaggaatgagccctgtgttgggttatggaatgtttatcttcggtctgcttggctattttggcctggaccgcatgttgccacatgctcatccgcaggatttaatgcaaaaaagcgtgcagccgttgccaaaaagcatcaagcgcacagccattctgctcactctcggcatcagtctgcataacttcccggaagggattgccacctttgtcacggcgagcagcaacctggagctgggatttggcatcgcactggccgtcgcgttgcacaatatccctgaaggtctggcagtggcaggcccggtttatgcggcaacggggtctaaacgcaccgcgattctgtgggcggggatttctggactagcagaaattcttggtggtgtgctggcgtggttaatcctcggtagcatgatttccccggtggtcatggcggcaatcatggcggcggttgcaggaattatggtggcgctcagcgttgatgaattaatgccgctcgccaaagagattgaccctaataataaccccagctatggcgtactatgtggaatgagtgtgatgggattcagtttagtgctgctacaaacggcgggaattggttaaaaacaacatcagaagttgtccagcgcatggacaacttctgccagcttcacgaaagccttattctaccttttcggctgtctcttctctcgtactgtttaagtatttgttccgcgcttcaagcagtgcgtctctgtcctggcgaaacgcccgacaataacgtttcaaatgcaggaaataacccaccacaaccagagcaatcaatacaatccagtaccaggcgataaacatccttttacccttaatatttaacaatactaaacatttagcgtataaatttcacatatcctttttcggatatattcatatggtcgcataataacggaacaattatatgattttgatcataatgaaaaagaatgcctgatattaatgaaattttctcatagaaagagaagcggaattaacatcttgcatagcagggaaaaataaaaaccgaagcctgctacaacttcggtttcttgattaaggcagtaaattaagcagcggttttcagctggctttacgctcatgtgcctgacggtatgccaccaggtcttcaatagtcacgagcgccatattgtgtttattggcaaactcaatacactctggtgcacgcgccatcgtgccatcgtcattagtcagctcacacagtacaccagccggtttaaagcctgccagcgtcatcagatcaatagttgcttcagtatgaccgccacgcgtcagtacaccacctgcctgagcgcgaagtgggaaaacgtggccaggacgattcagatcactcggttttgcgccatcggcaatcgctgcgcgaacggtcgtaatacggtcagcggcagaaacaccggtagtcacaccttcagctgcttcaatggtcacggtaaaaccggtgccataggcgctggtgttattttctaccatcattggcagatcgagttgtttacggcgatcttcagtaatgcacaggcaaacaataccgctaccgtggcgaatggtcagcgccatctgctcaacagtcatggtttctgccgggaagatcatatcaccttcgttttcacggtcttcatcatcaagcaccattacaccgcgtccttcacgcagcgcagccagtgcattttcaacacgttcgaaaggcgtaccaaaagaggaaagtagcgtctgattcatggtaaaaaaacctcactaaaattatggttaccagaatcagggcagtcttaggagtggcggcatatagccaaaataacgtgagcgggtccatgcccgacagaatcgttactctctcccatccggactctaaccgtcggccccggaattacaccggatctgctgtcctttgagttcgcacccaaagcgctcgcgggctttcaactgagttgatttaccgccggtggggaatttcgccccgccctgagaataagcggattcactataacgctaatgattagcggcagcaacgcatagcttcacataattctggtttatatctaatacaaacactaaaacgggccatcaggcccgttatatcagtgctctaactccagctctcttgcctgcatcatctgttgacaataccaggcataacgtgcgcaaaaccaggttctatgttcttcatccatgttaccagtaacggccagaatatcgaccgggcgaccttctgcgtgcattctggcaaaactacgcgccaggaaatcgaaattatttaaagaattaagactatgatccataagcacatcctccggttatcgcataccttttaaggccatatgctttttctgatttcagtattccccaatcagtgtagtgcctttaaacataacgtgcgtaaatatattgtccccgatcacactttttagtgaaaaataaaaaaccatattaaaagactttctcttccagaacttctctaacctgtgttattattaacacagataaatgtaagcaaggaaactattacaaagtaaatattgcgtcactaaatggacattggagtgatatatgattttattcgccgactataacaccccttatcttttcgctatttcctttgtactgttgatcggcctgttagaaatttttgcgcttatctgcggtcacatgctctccggtgctcttgatgcacatcttgaccattatgattctataaccacaggtcatattagccaggcacttcattatctcaatattggaagattgccagctctcgtcgttctctgcttactggctggtttttttggtcttattggcatcctgttgcagcatgcctgcatcatggtctggcaaagtccactgagcaacctgttcgtggttcctgtcagtttactgtttacgattattgcggtgcattataccggtaaaatagttgcgccctggattccacgcgaccatagtagtgctattacagaagaagaatatattggtagcatggcgttaattaccggtcatcaagccactagtggtaatccctgcgaaggaaaactcaccgatcaatttggccaaatacattatttactactggagcctgaagaaggaaaaattttcactaaaggagacaaagtgttaattatttgccgactttctgcaacgcgatatttggcggaaaataatccctggccccaaatattgtaatttattaatcaaaaggaaatttaataatggatgatattgttaattctgtgccctcctggatgtttaccgcaattattgccgtatgcattctgtttattattggaattattttcgccaggctctatcgtcgcgctagcgcagagcaagcttttgttcgtactggtttaggtgggcaaaaagtggtaatgagcggtggcgcaatcgtgatgccgatctttcatgaaataatccccatcaatatgaatactctgaagctggaagtcagccgcagtaccattgatagcctgattacgaaagatcgtatgcgcgtcgatgtagtagtcgctttctttgtgcgggtaaaacctagtgtagaagggattgccaccgctgcccagacgctggggcaacgcaccctgagccctgaagacttacgtatgttggttgaagataaatttgtcgatgccctccgtgcaacagctgcgcaaatgaccatgcatgagttacaggatacccgcgagaactttgtgcagggggtgcaaaatacagtggcagaagacctgagcaaaaacggtctggaactggagagcgttagtcttaccaactttaaccagaccagcaaagaacatttcaatccgaacaatgcctttgacgccgaaggtttaaccaaactgactcaggaaacagagcgccgtcgccgcgaacgtaacgaagttgaacaggatgtagaagttgcggtgcgtgaaaaaaatcgcgatgcgctaagccgcaagctggagattgaacagcaagaagcgtttatgacgcttgagcaggagcagcaggttaaaacccgtactgccgaacagaatgcacgtattgcggcttttgaagctgaacgtcgtcgtgaagcagagcagacacgaattctggctgaacgacagattcaggaaacagaaatcgaccgcgaacaggccgtccgcagtagaaaggttgaagctgaacgtgaagttcgcattaaagagatcgaacagcagcaggtcaccgaaatcgctaaccagacgaaaagcatcgctattgccgccaaaagcgaacaacagtcccaggcagaagcgcgtgctaatctcgcacttgcagaagcggtaagcgcccaacaaaacgtagaaaccactcgccagactgccgaagccgatcgtgctaaacaagttgccctaatcgctgccgcgcaggatgcagaaaccaaagcggttgaactgaccgtgcgggcgaaagcagaaaaagaagccgcagagatgcaggcggcggctatcgttgagttagccgaagctacacgtaaaaagggtctggcggaagcagaagcacaacgtgcgctgaacgatgctatcaacgtactttctgatgaacaaaccagccttaaattcaaactggccttgttgcaggcgctgcctgcggtaatagagaaatccgttgagccgatgaagagtatcgacggtatcaagattattcaggtcgatggtctgaatcgtggcggcgctgcgggtgatgcaaacacgggtaatgtggggggcggaaacctggcggaacaagcattaagtgccgctctctcttaccgcacacaggcaccgctgattgactccttgctcaatgaaattggcgttagtggcggcagtctggcggcattgactagtcccttaaccagtacaactcccgtcgaagaaaaagcagagtaaaccctcttccaggaataatccctggcccaaaaagccggggattttttatatctgcgttccgctaaaaagtgcaaatgatcaggttgttgcagcattttgcgtgacggctcggggaaggcaaaactgcatcagagaaagcattgcgtggggtctggcgctcatcaacaatcggggagtcagcagggggctgaaacgggaaagcccctcccgaagaagggggccttacagaaggaaagggttatgatgaagctcgtcatcatactgattgtgttgttactcgtaagtttcgcagcttattaacagccaatcagaggggggagaaatcctccctcacccttgttcctttactttaggttgaaaaaaaatcagcgtcaagaaggtttcattaacacatatccctggcccaaaaagccggggattttttatatctgcgttccgctaaaaggtgcaaatgctcaggacgttgcagcgttttgcgtgaccgctcggggaaggcaaaattgcctctgggaaagcattgcgcggggtccggcgctcatcaacaatcggggggcagcaaggggctgaaacgggaaagcccctcccgaagaaggggccttgtataaggaaagggttatgatgaagctcgtcatcatactggttgtgttgttactgttaagtttcccgacttactaacaactcatcagaggggggagaaatcctcccttacccttgttcctttactctaggttgaaaaaacaacagcgtcaataggcctgccatgtacgaagcgagatctgtgaaccgctttccggttagccttttttatcctgttggatcttcttgatgatgttggtcgtgctgcaaccgtcttcaaagttgagcaccaacacttcgccaccgttggcccagacttctttactcccggcaatctcttctggtttatagtcgccgcctttcaccagcagatctggcaagatcccggcgatcaagcgctgcggcgtgtcctcttcaaagctcactacccagtcgaccgcttccagtgcgcccagcacaatcatacgctgttcgagtgggtttaccgggcgggaatcccctttcagccgtttggtggaggcatcgctgttgacggcaacaatcaagcggtcacccagcttgcgggcatttgccagataagagacgtgcccggcgtgcaggatgtcaaagacaccgttggtcatcaccactttttcaccacgtttacgcgctgccgctacggccagcttcagttcctcttcggtcatcacgccaaagcctgtatctgcacgtccacgtacagcattttccagctcgatcgggctaaccgtggaggttcccagtttgccgaccaccacgccagccgccgcattggcaaagaagcaggcttcttccaggctattacccgctgccagcgttgccgccaggacgccaatcaccgtgtcgcccgcaccggtaacgtcatacacttcctgcgcttgggttggcatatgcagcggcgctttacccggttgcagcaggctcataccctgttcggaacgggtcactaacagagcgctgagttcgtaatcggcaatcagtttcatgccgcgctcaacaatctcttcttcggtcttacatttaccgacaacagcttcaaattcgctgagattcggcgttaacagcgtagcgccgcggtagcgctcaaaatcggtaccttttggatcaatcagcaccggaacacccgctttacgcgccagttggatcatctgctgtacgcttgccagcgcacctttggcgtagtcagaaagcaccagcgcgccaatgctactcagcgcctgattaatccgctcgtgcagcggctgcggatcaacaccttcgaaaccttcttcaaaatccagacggatcagctgttggttgcgggaaagtacccgtaatttggtaatggtcggatgcgtcggtacagaaacgaagtcgcatttgacgttgacgtcggccagagatttactcagcgcgcgcgctgcatcgtcaatgcccgtcaacccgaccaggcgtgcattagcaccgagagaagcgatattcatcgccacgttagccgcgccgcccggacgttcttcgatggtattcactttaaccacgggcaccggcgcttccgggctgatacgactggtggggccgtaccagtaacgatccagcatcacatcaccaaccaccatcactcctgcacgttcaaactctggcagcgttactttcattcctgtctcctgagagattcaaaatttgcgcgcgataataccatacttcattcttccaccagccacttctgccagcttgcccgcaccagttcacgctctgcggtgaagcaatcctcgctcacatggcccggcaattcctgtaatgccagatgatgaagttcatcgcgaagcgtagtgtaagcacgggtcagcgccatcgcttcctgctcttccataatgtcgttttgcgccagtagttccagaatacgcacgttgtcactccagcgcgttaacttcggtttttcatgagcgtagcgcaacaccagatattgggtaataaattcgatatcggtaattcccccttcatcagctttgatatcaaagcgatcgcgatgtttattgccgagatgagcgcgcattttctcgcgcatttcccgcacttccgtttgcagagttttaccttcacgcggcagcgtcataatctcgcgacgcactgcgtcaaagtgcgcggtgagctgcggatcgccgtacactacacgcgcacgcaccagcgcctgatgttcccacgtccaggcctcgtttttctgataatcggcaaatgcttctgcggatgtcaccagcattcccgccgccccggacggacgcagtcgagcatccacttcatacaaaatgccggaagaggtacgcgtactgaacagatgcataatgcgttgcgccagacgcagataaaactgccgcccgtcgatttcccgctcaccgtcagtcatcgcatccattgggcaatcatggaggaagataaggtcaagatcggaactgtagcctaactcccagccgcccagcttgccgtagccgaccaccgcaaaaccacgcccttcgcgttcgttcaggtgattcggcttaccgtagcgggcaaccatttgaacccacgcctgctgaacgacggcatctatcatggcttccgccagccaggttaagtgatcgctcactttcatcaccggtagcgtaccggcgatatccgctgcggcgatgcgtaacagctgcgcctgtttgaactgacgcagcgcctcaagctgttgctcttcgtcatcttccggcacgcgcagcaaatactggcgcaactcatcgcggtaggcatcggtcgccgtcggctggtaaagggtgtttggatcgagcaattcatccagcaataatggataacgcgccagctggctggcaatcatcgggctcgcggcacacagagaaatcaaatgtttaagcgccgcggggaattcactgagcaattctaaataggtggtgcgggtaacaatccccaccagcaaggcggtaatgcggctcagcgtaacggcagcgtcttcacgcgcacagacatcacttagcagatgcggcatcagatggtcgagcacctgacgtcctcgcggcccgatggtgcgcttatccagctctttgcggaaatcggcaatcagcgttagcacctgtttgcgatcatcctcgctaagatgcgccagcactggcgtagtgtcatcttcctgcaacgcatcctgccacagctcacgccactgttcgctcaggctctcttcctgagtttcactttcatcgtcgccaatcaattcattaaacacccggcgcacattggtcatatgtgcggtcagcgccccggtcagttgcggccagtcagcaaagtccatcgcccacgccagccgcgcacgattaagctcatcagaaggaagcgtctgggtttgttcgtcgttaatgctttgcagcaggttttccagacgccgcaggaacagatacgccactcgcaattgttcagcatcgttttcagaaagcagatgcagctcggcaatggcgctgagcgttggcagtaaagagcggctttgcaggctcggttcgcgtccgccgcgaatgagctggaacacctgaacgataaattcaatttcgcgaatgccgcctgcgccgagtttgatattgtcggtcaaaccacgtcgacgcacttcacgggcaatcatccctttcatgttgcgcaggctctgaatcacgctgaaatcgatgtaacgacggaaaacaaacgggcgcagcatcgcacgcaactcgttagcatagacgccttcgctatcgcccataatccgcgccttgaccatcgcgtaacgctcccagtcgcgcccctgctcctggtaataatcttccaacgcggcaaagctcagcaccagcgggccactttcgccaaacggacgcagccgcatatccacgcgatagacgaagccatcctgcgttggttgatccagcactttaatcagccgctgccccatgcgggtaaaaaactgcgcgttatccagttcccggcgtccaccctgcgtacaaccatgttccggccaggcaaaaatcagatcgatatcagaggagaaattcagctccccaccgcccagcttacccatgcctaaaatcagcagcggttgcgcttcgccctgcgcattgcacggcgttccccactcgcggcagcaggcgtcatacagccagtcacgcgccgcaacaatcagcgtctccgccagatagctgagctgctgcaatatgctctcttcagtaaccagtgccagcgtttgcgcccaggcgatgcgcaccataatgcgccgccggaatagccgcagctcgcgcattaacccggcttcgtcactcacattacagagcgcctcctgcaaccatgccgcgtaatgctgccattcgtcggcctgcggcggttggctttccagttccgtcagccactctggatgcgcaatcacgctgtcctgcacaaaatcactaaaagtaagtacactcttcgcctgtgcgctaagactttcctcggctaaaggctctggcagccgctcaacaacggtctgccagtactgctgtaacggactagagagcggcttcataagcgattttatccttgcctgattaacgttttccgctgtgcaaccagaacggttcctgattgtttgcctcattacggaaatgttcaatttcgatgcgttgcccggtcgcaatagcgtgatgcagcccctgccagttctccagccaggcttgcgcgacgacaggatcatagtaacccgccagcaacagtatactgtcaatatcacgcgtcaggcgtggcaactggtcacggtagcgatcgcctaacggctggcagaaaacgcttttcagttcagcggcatggcgggaaagatggatatcggcaaagcgtttgaaggagtcgctgattttgccctgcgctttggcatctaaaaatggctgccatgctttgcttaccaaccattcggtcaacgccagcttcgccattgccgtttcggtagagtagaccgccgtcacggcagacaccgcagaagcaatggtcgcctcgcattgagtcagcagatcacgtaagtgagtgctcgctttacgcggcacaataccaccgaacagcatcagcgtatgacggaccaggctaatggctgccagcacctgttctttcgccgcatcgttgccgcgtacccacagttcttcatgatactgccattgcgctaacgccagctcgagcgccgcttccagcccctgttccacatcggcttttgccgcaacatgcaaaatggtggtcggtttgatttcacgcgccggattgccctgcgccagatgatagccacgcgccgctttgctcaggctgccctggcgtaatccggtttggcttaccagttggttcgccagtttcagcaccgcgcgcgtgtcgccgctaagcagttccagttccagctcacagataggttcagcaaattcacccgctttcacttccccctggtcgagggcgatttcaatttggctaccatcgaccgccaccagccatttttcgcgataaaaatcggtgctgaacagcggctgcacgcgggaggcgagatcggcgggcaattcgccgttcggccagacttccgtcggtaactgcgccaggtcgagcgtcggttcgctcaacgccacgttatattccgggcgctgatgtaagccgcctgtcactcttcctgcaactttcatggtcatctcatagcgaccgttttcgccacgaatacgtaagcccatatcgtgcccacgcagccagttatccggcgtttcgtagtaaatattcagcaactgcacggggtcatggtgctcgccgcccagcgtattgagatggtcacgcaacgcctcaacggcactgtgattaacaataaactttaattcgatttcctgagccatggcctttacttatcggttatgtcacataagtgacgatgaacggcgaacttaatgcgatcttttttgtcagtagatagtattttgcgccaaattgccatgcaacgggcaatttgacgggcgtaaaagtttgaagcagtggcaagacctgacacagaggattccgattgatgtcgaatgctttgcgtagcgacactgatgccactactatcgttccactttccatgacaataacgacagcctgatgccaaaattacgcctgatcggattaactttactcgcacttagcgcgactgccgtcagtcacgctgaagaaacgcgctatgtttccgacgaactgaatacctgggtccgcagcggtccgggagatcattatcgcctcgtgggcacggttaacgccggcgaggaagtgaccttattacaaactgacgccaacaccaattatgcccaggtgaaagacagctctggccgtaccgcctggatcccgttgaaacaacttagcactgagccaagcctgcgctcccgtgtgccagatctggaaaatcaggtcaaaaccctgaccgataaactcaccaatatcgataacacctggaatcagcgcaccgcagaaatgcagcaaaaagtggcgcagagcgacagcgtgatcaacgggttaaaagaagaaaatcagaaactgaaaaacgagctgattgtcgcgcagaaaaaggtcgatgccgccagcgtacagctggatgacaaacagcgcaccatcatcatgcaatggtttatgtatggcggtggcgtgctggggcttggcttgctgctcggtctggtactgccgcacctgatcccaagccgcaaacgcaaagatcgctggatgaactaaatcgccttcttcgttgcactgtcttattattaggaattgtgtatttgacgaagggatgatggcgtgaagatttatctggtcggtggtgctgttcgggatgcattgttagggctaccggtcaaagacagagattgggtggtggtcggcagtacgccacaggagatgctcgacgcgggctaccagcaggtaggccgcgattttcctgtgtttctgcatccgcaaacgcatgaagagtatgcgctggcacgtaccgaacggaaatccggttccggttacaccggttttacttgctatgccgcaccggatgtcacgctggaagatgatcttaagcgtcgcgatctgaccattaatgcgctggcccaggacgataacggcgagattatcgacccgtacaacggtctgggcgatctgcaaaatcgtctgttgcgccatgtttcccccgcttttggcgaagatccgttacgcgtattgcgcgtggcgcgttttgctgcgcgttatgcccacctcggttttcgtattgccgatgaaactctggcgttgatgcgcgagatgacccatgcgggtgaactggaacacctgacgcctgaacgggtatggaaagagacggaaagcgccctcaccacccgcaatccacaggtgttcttccaggtactgcgcgattgcggcgcactgcgcgttttattcccggaaattgacgcactgtttggcgttccggcccctgccaagtggcatccggaaatcgatacgggtattcataccttaatgacgctcagtatggcggcgatgctgagtccgcaggtcgatgtccgtttcgcaactttatgccacgatctcggtaaagggctgacgccgccagaactctggccgcgtcatcatggtcatggcccggcgggtgttaagttagtggaacaactatgccagcgtctgcgcgtgccaaatgaaattcgcgatttagccagactggtggctgagtttcacgatctcatccacaccttcccaatgctgaacccaaaaaccatcgtcaaattatttgattccatcgatgcctggcgtaaaccgcagcgtgtcgagcaactggcgctgaccagcgaggctgacgtgcgcggcagaaccggttttgaaagtgcggactacccgcaaggccgctggttgcgcgaagcctgggaagtggcgcagagtgtgccgacaaaagccgtcgttgaagcgggatttaaaggtgtggagattcgcgaggagctgacccgacggcggattgcggcggtagccagctggaaggaacaacgttgcccaaagcctgaatgagtattgggcattttgccggatgcggcgtaaacgccttatccggctacatgtcaacgacagttgtaggcctgataagacgcgcaagcgtcgcatcaggcgttgattgccggatgcggcgtgaacgccttattcggcctacgcaatcgttgacaacgccaagcatccgacactattcctcaattaaaagaacacgacatacaccgcagccgccacaataaagcgataaatggcgaacgggataaagctaatgcgcttaatcaattgcaggaaggttttaatcgctatcagcgccaccacaaaagcggtgataaacccaacggcaaacatcgggatatcgccgcttgtcaggaagccccagcttttgtagagatcgagcgccgttgcgcccatcatcatcggcaccgccagcaggaagctaaactcggaagcagcgtaacggctcacccccatcagcatcccaccactaatggtcgccccggaacgggagaaacccggccacagcgccagacactggaaacagccaatcataaatgcctgacgataggtcatatcatcaagacccggcgcacgcggctctttcggcttcaggcattcggcggcaatcagcaacaaaccgccaacgaccagcgcatacatcacatttatcgggttaaacaaactcttaatcgtgtcgtggaacaacagccccaataccaccgccggaatcatccccagcaaaatgtggatcagcgttaaacgacctttgctttcaccttcgtgctgcaacgggcggccaaagtggatgccaatcaggccaaacagacgccgccagaacatcactactaccgccagaatacttcctaactggatcacaacttcaaaggttttcgccgtgtcgccctcaaaccccaacaagtgaccgacaataatcatatggcccgtgctggataccggcagaaattctgtcaatccttcgaccacacccaatattgccgctatcagcaggctgtgcatatcgctcatcaataaacccctaaattattaaaatgtaccgcttgtccgaactactgcgtatgaccaggttataaccgtttggtttaacagctgtaaaattaattattttctttcagattattgccacgctcaatgattacgccaacattcgccgcccgcgccactgcgcctggcttgctgagtttgatacgcacccacgggctgttgaagcgtgctaacagcagctccgccacctcttcagccacgcgttccaccagcgcaaaacgcgccccctcgacgtggctgaccaccgtttctgcaatgtcagcgtaactgaggcaatccgccacatcatcacttttcgccgctttacggttatcccacgccatttcgatatcgaacactaacttctgttcgatggtctgttcccagtcgtaaacaccaatagtggtgattacgctaagttgctctataaatacaatatccatcacgtcctgcctgctttttggctaaccggataccacttccggcgaaatgtgcgtattatccacagattcatcgttgaacacgaattttcaaaacggaacagcttatgagtgcaatcgcgcctggaatgatcctcatcgcgtacctctgcggctccatttccagtgccattctggtttgccgcttgtgtgggctgcccgatccgcgaaccagcggctccggcaatccaggcgcaaccaatgtgttacgtatcggtggcaagggagcagccgtagcagtactgattttcgacgttctgaaaggaatgttgcccgtctggggcgcgtatgaattaggtgtcagccccttctggctaggcttaattgccatcgccgcctgtcttggacacatctggcccgttttcttcggatttaaaggaggaaaaggcgttgctaccgcttttggtgccatcgcacccattggctgggatctcaccggagtaatggcgggaacctggttactgaccgtgctattgagcggatacagcagcctgggagcgattgtcagtgcactgattgctccgttttatgtctggtggtttaagccacaattcaccttcccggttagcatgctctcttgcctgatcctgctgcgtcatcatgacaacatccaacgtctgtggcgtcgtcaggagacaaaaatctggacgaaattcaaaagaaagcgcgaaaaggatcccgagtgatttctggtggatttacatgacctgatagccttcatcgggcttgcccagccgttgctggcaccatgccgccagaaattccacgcagacacgtaatttcatgctgcgatagagcggctcccggtaaacagcccagatattggcgctttgtgcatactctggcaatacttgcaccagtttgccactctccagaaacggcaacacatcccactcggaacgcagcataatccctttgccctccagcgcccattgcagcacaatctcgccgctattggaggaaagatgcccgcttaccttcacgctttttttctcctgaccgttccccaactcccatattccatgggtcatatcgcgctctttggtcaccagacagtcatgacgacttaattcctgtagggattgtggctgcggatatttttgcagatactcaggtgctgcgcataatattcttttattttttgtcaaaagatgcgcaatataataatcaggaatttcgtcattaatacgaatatccagatcaatattatcctgcactaaatcaatttgccgatcgaacaattcaaaatgcacctgtaactcaggataattgcgcatcagttcggtaatagctggcgcaatatggctgcgcccaaaaccaaaactgcaaccaatacgaatcatcccctccgggcgcgttttgatttgcgtgacgtcatcgaccagtcgctgatattgggtgaggatttccaacgcatgttcgtaacaacgttggccactttcagtcagcgccacgccgcgagcggagcggttcagcagcgttgttgccagcgtattttcaaggatttggatccgcttggtgacaaatgcaggcgtctgcccaagcgtcgccgctgcggcgctaaaactcccgctgtgaacgatttctaccagtacctgcaagtctttggctaaaggccagctattcagcatcgttaattatccgcagttgtgataagcgcagtgtatttcgcaaaacattgccattccctgctctggcgcaatattcattcttattttcgcgttgattcacgaactgttaattacatattcacggtggcaaaaaatataaaaccacatttttagtggtagtttgtggcggtgaatttttccagacaaatacaaaaactggagttgccatgatgagcgaaagtaataagcaacaggcagtgaataagttgacagagattgtcgctaactttaccgccatgatttctacccgaatgcctgatgacgtggtggataaactaaaacagctaaaggatgccgaaacgagcagcatggggaaaattatctaccatacgatgttcgacaacatgcaaaaagcgattgacctgaatcgtcctgcctgtcaggacaccggggagattatgttcttcgttaaagtcggttcccgcttcccactgcttggcgagctgcaaagcatactcaaacaagccgtggaagaggcaaccgtcaaagcgccactacgtcacaatgcggtagaaatttttgacgaagtaaacaccggcaaaaataccggtagcggcgtaccgtgggtcacctgggacatcatccccgacaatgacgatgcggaaatcgaagtttacatggcaggcggcggctgcacgctacctggccgcagcaaagtgttaatgccgagtgaaggctacgaaggcgtggtgaaattcgtcttcgaaaatatctccaccctcgccgtaaacgcctgtccaccggtactggtgggcgtgggcatcgccaccagcgtggaaaccgccgccgtactcagccgtaaagccattttgcgcccgattggcagccgccatcccaatccaaaagcggcagaactggagctacgcctggaagaaggactcaaccgtctggggattggtccacaagggctgaccggcaacagtagtgtgatgggcgtacatatcgaatctgccgcccgccatccgagtaccatcggcgttgctgtctctaccggctgctgggcgcatcgtcgcggcacgctgctggttcatgccgatctcacctttgaaaatctgtctcacacccggagcgcgttatgaaaaagatcctgacaaccccgatcaaagctgaagatctgcaagatattcgcgtcggcgatgtgatctacctgaccggtacgctggtgacctgccgcgacgtttgtcaccgccgtttgatcgaactgaaacgtccgatcccttacgatctcaacggcaaagcgattttccacgctggccccatcgtgcgcaaaaacggcgacaaatgggagatggtctccgtcggcccgacaaccagtatgcgtatggaaagttttgaacgtgaatttattgagcagaccggcgtgaaactggtggttggcaaaggtggtatggggccgctgaccgaagaaggctgccagaaattcaaggcgctacatgtgattttcccggcaggctgcgcggtgctggcggcaacccaggtggaagagattgaagaagtgcactggacagagctcggaatgccggagagtctgtgggtctgccgggtcaaagagttcggcccgctgattgtctctattgatacccacggcaacaacctgatagccgaaaacaaaaagctgttcgccgaacgccgcgatcccatcgtggaagagatctgcgagcacgtccattacatcaaataaccctcccggagaggctcacccctctcctttttcgcaggcataacacgatgaaaccttccactgaatggtggcgatatcttgcgccgctggcggtcatcgccattattgctctacttccggttcccgcagggctggagaaccatacctggctctactttgccgtttttactggcgtgatcgttggactgatcctcgaacccgtgccgggtgccgtggtggcgatggtgggtatatccatcatcgccatactctctccctggctgctgttcagcccggagcagctcgctcagccaggctttaaattcactgcaaaatccctcagctgggccgtttccggtttttctaatagcgttatctggctgattttcgccgcctttatgtttggcacaggctatgaaaaaaccgggcttggacgccgcattgcgctgattctggtgaaaaagatgggacatcgcacgctgtttctcggctatgcggtgatgttctccgagctgatcctcgcacctgtaacaccgtccaacagcgcgcgtggtgcggggattatctatcccatcatccgtaacctgccaccgctctatcaaagtcaaccaaacgacagcagtagccgcagcattggcagctacatcatgtggatggggattgttgccgactgcgtgaccagcgccattttcttgacggcgatggcaccaaacttgctgttaattggactgatgaaaagcgcatctcacgccacgctgagttggggcgactggttcctcgggatgttgccgctcagcattttactggttctgctggttccctggctggcttacgtgctgtacccgccggtactgaagtctggcgatcaggtgccgcgctgggcagagacggaactgcaggcaatgggcccgctctgtagccgtgaaaaacggatgctggggctgatggtaggcgcgctggtgctgtggattttcggcggtgattatatcgatgccgcgatggtcggttacagcgtggtggcactgatgctgcttctgcgcattatcagttgggacgacattgtcagtaataaagcggcgtggaacgttttcttctggctggccagccttatcaccctcgccaccggactcaacaacaccggttttattagctggtttggcaaactgttagcaggcagcttaagcggttatagcccaacgatggtgatggtggcgttgattgtggtgttttatctactgcgctactttttcgccagcgccacggcgtatacctccgctctcgcaccgatgatgattgctgctgcgctggcgatgccggaaatcccgctgccggtgttctgcctgatggttggtgcggcaattggtctggggagcattcttacaccatacgccaccggccccagtccgatttactacggcagtggttatctgccaacggcggattactggcgactgggggcgatttttgggctgatattcctcgtattgctggtgattaccggcttactgtggatgcccgtggtgttgctttaagtgaggacggtgccggaaattgctctccggcacccaatagttttacgcagccggtaactccgccagcggccagcgcggacgcacgctaacgccgagatccgccgtcgcgcctgctttaaaccgcaccattccggcataggcgatcatcgcgccgttatcagtacaaaattccggacgcgcgtagaacacttcgccgcggcgttttttcatcatttcagccagcttcgcccgtaacgtacggttagcactcacgccgcccgccatgaccagtcgcttaaagcccgtctgatccagcgcccgcttgcacttaatcatcagcgtatcgaccaccgcatcttcaaaggcgcgggcgatatcagcacgcgtctggtcgtcggtgccgttgtcacgaatggtatttgccgcgaaggttttcaggccggagaagctgaaatccagccccggacggtcggtcatcggacgcgggaagacaaagcgcccggcagtaccctgagccgccattttgctcagtaacggcccgccaggataatccagccccagcagcttcgcggttttatcaaacgcttccccggcggcatcatcgatagactcgccgagcagctcgtactgaccaatgccagtcacgctgattaactgcgtatgaccgccggaaacaagcagcgcaacaaacggaaattccggcgggttatcttccagcatcggcgctaacagatgcccttccatatggtgtacagggatcgccggaacgtcccaggcaaacgccagagaacgccccacggtcgcgccaaccagtagcgcgccgactaatccagggcctgcggtataggccacagcatcaatgtcttttgccgttaaaccagactcctttagcgccgcctggatcaacggtacggttttacgcacatgatcgcgggaggccagttcaggcacgacgccgccgtagtcagcgtgcaatttcacctgactatacaattggttggctaacaaacctttttcatcgtcgtaaatggcgatgccggtttcatcgcaggaagtttcaatacccagtacacgcatgacttgttttacctcgctttattaccgcgcagtgtaggaccaatgcgggttgatgtaaaactttgttcgcccctggagaaagcctcgtgtatactcctcacccttataaaagtccctttcaaaaaaggccgcggtgctttacaaagcagcagcaattgcagtaaaattccgcaccattttgaaataagctggcgttgatgccagcggcaaaccgaattaatcaaaggtgagaggcacatgccggtaattaaagtacgtgaaaacgagccgttcgacgtagctctgcgtcgcttcaagcgttcctgcgaaaaagcaggtgttctggcggaagttcgtcgtcgtgagttctatgaaaaaccgactaccgaacgtaagcgcgctaaagcttctgcagtgaaacgtcacgcgaagaaactggctcgcgaaaacgcacgccgcactcgtctgtactaattccccgagagcgttgctctccgatcagaccgagttgtagttgtaaggccgtgcttccgaaaggaatgcgcggcttattttcgtttatgaattgctaaaaatcggggcctatggctggacgaatcccacgcgtattcattaatgatctgctggcacgcactgacatcgtcgatctgatcgatgcccgtgtgaagctgaaaaagcagggcaagaatttccacgcgtgttgtccattccacaacgagaaaaccccgtccttcaccgttaacggtgagaaacagttttaccactgctttggatgtggcgcgcacggcaacgcgatcgacttcctgatgaactacgacaagctcgagttcgtcgaaacggtcgaagagctggcagcaatgcacaatcttgaagtgccatttgaagcaggcagcggccccagccagatcgagcgccatcagaggcaaacgctttatcagttgatggacggtctgaatacgttttaccaacaatctttacaacaacctgttgccacgtctgcgcgccagtatctggaaaaacgcggattaagccacgaggttatcgctcgctttgcgattggttttgcgccccccggctgggacaacgtcctgaagcggtttggcggcaatccagaaaatcgccagagtttgattgatgcggggatgttggtcactaacgatcagggacgcagttacgatcgtttccgcgagcgggtgatgttccccattcgcgataaacgcggtcgggtgattggttttggcgggcgcgtgctgggcaacgatacccccaaatacctgaacagcccggaaacagacattttccataaaggccgccagctttacggtctttatgaagcgcagcaggataacgctgaacccaatcgtctgcttgtggtcgaaggctatatggacgtggtggcgctggcgcaatacggcattaattacgccgttgcgagcttaggtacgagtaccaccgccgatcacatacaactgttgttccgcgcgaccaacaatgtcatttgctgttatgacggcgaccgtgcaggccgcgatgccgcctggcgagcgctggaaacggcgctgccttacatgacagacggccgtcagctacgctttatgtttttgcctgatggcgaagaccctgacacgctagtacgaaaagaaggtaaagaagcgtttgaagcgcggatggagcaggcgatgccactctccgcatttctgtttaacagtctgatgccgcaagttgatctgagtacccctgacgggcgcgcacgtttgagtacgctggcactaccattgataagccaagtgccgggcgaaacgctgcgaatatatcttcgtcaggaattaggcaacaaattaggcatacttgatgacagccagcttgaacgattaatgccaaaagcggcagagagcggcgtttctcgccctgttccgcagctaaaacgcacgaccatgcgtatacttatagggttgctggtgcaaaatccagaattagcgacgttggtcccgccgcttgagaatctggatgaaaataagctccctggacttggcttattcagagaactggtcaacacttgtctctcccagccaggtctgaccaccgggcaacttttagagcactatcgtggtacaaataatgctgccacccttgaaaaactgagcatgtgggacgatatagcagataagaatattgctgagcaaaccttcaccgacagtctcaaccatatgtttgatagcctgcttgaactgcgccaggaagagttaatcgctcgtgagcgcacgcatggtttaagcaacgaagaacgcctggagctctggacattaaaccaggagctggcgaaaaagtgatttaacggcttaagtgccgaagagcgatcgggaagcccccgacagccgcactgagaggcagcggcaaatatataagtacgccctcgtaattatcgttggcggtaaacaaccgttggatttcagcgttaacggctgaaggacatcgggtcaatcgcccaacaccaacctcatgaaataagtgtggataccgtcttatggagcaaaacccgcagagtcagctgaaacttcttgtcacccgtggtaaggagcaaggctatctgacctatgccgaggtcaatgaccatctgccggaagatatcgtcgatagtgatcagatcgaagacatcatccaaatgatcaacgacatgggcattcaggtgatggaagaagcaccggatgccgatgatctgatgctggctgaaaacaccgcggacgaagatgctgccgaagccgccgcgcaggtgctttccagcgtggaatctgaaatcgggcgcacgactgacccggtacgcatgtacatgcgtgaaatgggcaccgttgaactgttgacccgcgaaggcgaaattgacatcgctaagcgtattgaagacgggatcaaccaggttcaatgctccgttgctgaatatccggaagcgatcacctatctgctggaacagtacgatcgtgttgaagcagaagaagcgcgtctgtccgatctgatcaccggctttgttgacccgaacgcagaagaagatctggcacctaccgccactcacgtcggttctgagctttcccaggaagatctggacgatgacgaagatgaagacgaagaagatggcgatgacgacagcgccgatgatgacaacagcatcgacccggaactggctcgcgaaaaatttgcggaactacgcgctcagtacgttgtaacgcgtgacaccatcaaagcgaaaggtcgcagtcacgctaccgctcaggaagagatcctgaaactgtctgaagtattcaaacagttccgcctggtgccgaagcagtttgactacctggtcaacagcatgcgcgtcatgatggaccgcgttcgtacgcaagaacgtctgatcatgaagctctgcgttgagcagtgcaaaatgccgaagaaaaacttcattaccctgtttaccggcaacgaaaccagcgatacctggttcaacgcggcaattgcgatgaacaagccgtggagcgaaaaactgcacgatgtctctgaagaagtgcatcgcgccctgcaaaaactgcagcagattgaagaagaaaccggcctgaccatcgagcaggttaaagatatcaaccgtcgtatgtccatcggtgaagcgaaagcccgccgtgcgaagaaagagatggttgaagcgaacttacgtctggttatttctatcgctaagaaatacaccaaccgtggcttgcagttccttgacctgattcaggaaggcaacatcggtctgatgaaagcggttgataaattcgaataccgccgtggttacaagttctccacctacgcaacctggtggatccgtcaggcgatcacccgctctatcgcggatcaggcgcgcaccatccgtattccggtgcatatgattgagaccatcaacaagctcaaccgtatttctcgccagatgctgcaagagatgggccgtgaaccgacgccggaagaactggctgaacgtatgctgatgccggaagacaagatccgcaaagtgctgaagatcgccaaagagccaatctccatggaaacgccgatcggtgatgatgaagatagccatctgggggatttcatcgaggataccaccctcgagctgccgctggattctgcgaccaccgaaagcctgcgtgcggcaacgcacgacgtgctggctggcctgaccgcgcgtgaagcaaaagttctgcgtatgcgtttcggtatcgatatgaacaccgactacacgctggaagaagtgggtaaacagttcgacgttacccgcgaacgtatccgtcagatcgaagcgaaggcgctgcgcaaactgcgtcacccgagccgttctgaagtgctgcgtagcttcctggacgattaatcggtaggccggatcaggcgttacgccgcacccggcactaggccctctgcacaaacgccaccttttcggtggcgttttttatcgcccacgcactaccagcgcctggtccagctcgcgatacgcttcaaccagtttctccagactaacgcgacttaaaccgctgggatttggcagcacccaaatctgcgtgctaccaatggtgagcgtttgtttcccccactgtgcaccgcgctggctgaatccctgttcatatgcttgtttgcccagaatcgccaacgcctgcggctgataatcttcaattttttcaatcagcttacgcccgcctgcgtgtagctcctgcttactaacttcattggcttgcaccgttggacggtctaccagtttggtgacgccacaacgataatccagcagatgctgtgcctcctgcggcttcaactgacggtcggtaaacccggcctgatatatcaccttccagaagcgatttgccggatgagcaaagggaaaaccagtcccggcggaactaagcccagggttgataccgcaaaacacgacccgtaaccctggagccaaaatatcctcaaccatatttactcctttctaacatcaccaggaaaagtataacggattgaaaatacattgtttataaaaacagcaggcgcgcggtaatggctggattgcgacacggagttactttataatccgctaccatggccccttagctcagtggttagagcaggcgactcataatcgcttggtcgctggttcaagtccagcaggggccaccagatatagcaaaggctgacgagaaatcgtcagcctttttctttttatatatcagttactttgcgtgccagtaagccgctgcacgtacccgctgtgggtcatactgttccgcttcaaagcggcggcttaaattcttaacgactttaccttcgccggttatccagatgaagtaatcatcggcagggatttgcatctgcgccagacgcgcatctaccgcctgctcatcatgtgccagccattcgatattaaaaccatcaaggtgcgcgagataatcctgacaggcgttatcccgcacgctaaccagcgcactaacttgcggtttaacggcaagtttgctcaacgtttccaggcggcggcgcaatgcaggcattccggattcatcgcagacatacagctgatacgcgtaatcttccggcaccaccaggctaccgcgcggacctgccaccgtaagtttatcgcccggttgcgcctgcatcgcccagccgctggcgaccccaccgtcgtgaataaagaaatcaatcgccagttcatggcgtagttcgtcatacagcggcgtatagtcacggctcggtgggcgtggtccttccggccagacgatgccctcttccgttaccgttggcggcacaaagtgagcgtcaggttgaggaaagaagagtttgctgtgatcgtcaaagccacggcttgtaaaaccgtccagcgcctcgccgccgaggacaatgcgctgaaaaccggcgctgatgcgctcaacgcgtaacacagtcagttcacggaagcgcagatcattgcgaacgcgctgcgggtagcggggggtgttattcattgttatcgccttcgtgatggtaatcagatatatctaaataaaactcgcaaatgataatgattgttaatcatgataaatgcaagcgatttgtagaactgatatgtctatagtctgataagacgaaccgcctcttctcaggcatcattactcaacgccggatgcggcgtgaacgccttatccggcctacgtgtgagatgagtccacgtttaaaaatcatttttacacttgcaagaacgctcatatcagatataaattagatatatctaattaagcaaaaggaggctgatatgagccatcatcacgaagggtgttgtaaacatgaaggccagccacgccatgagggctgctgcaaaggtgagaagagtgaacacgagcactgcggacacggtcaccagcatgaacacggtcaatgctgcggtggtcgccacggtcgcggcggcggtcgtcggcaacgtttctttggtcacggtgaattacgtctggtgattctggatattctcagccgcgatgacagccacggttacgaattgattaaagcgattgagaatctaacccaggggaattacaccccaagcccgggcgtcatctacccaacgctggattttctgcaggagcagagcctgattaccatccgcgaagaggaaggaggtaagaagcagattgcgctgaccgaacaaggcgcgcagtggctggaagaaaaccgcgaacaggtggagatgattgaagaacgcatcaaagcgcgttgcgttggcgcggcgctgcgccagaacccgcaaatgaagcgggcgctggataattttaaagcggtgctggatttacgcgtcaaccagagcgatatcagtgatgcacaaataaaaaagatcattgcggtgatcgaccgcgccgcttttgatattacgcaactggattaatcgccgcatccgccagtggcgcggtgcaattgccggatgcgacgcttgacgcgccttatccggcctacacccgctacacaccccgcaggcctgataagatgcgccagcatcgcatcaggcattgtgctccaaccgccggatccggcataccgattaatgcagtaccgtcaccgcgtcttccagtcggctggcgcggtgtttcaccatcgcgctcacctgcgcactctcttccaccagctcggcatttttctgggtgatcaggttaagctcatccactgcacgggtcaggctggaaagcccatcggcctgttccagcgtactatggctaatctgggcgatcaactgggtgacgtttttcacctgtgccacaatatcttccatcgtccgtccggcggcgtgtacctgctggctaccggattgcaccttatcagcactggcatcaatcagcttgcgaatatcgttggcagcattagcgctgcggctggctaaatgacgcacttcccctgccaccactgcaaaacctttgccctgttcgccggcacgcgccgcttccaccgccgcattcagggccagaatattggtctgaaacgcaatatcgttaatcaggctagtaatggtgccaatgcgctgggtactgtcggcgatatcgtccattgtcttgatcaccgtggtcatcgcctccccaccctgcactgccgcattactggcagtgatactcagtttatcggcagcgctcgccgtggcagagttctgtttcacgctcgccgccatttggttcatggtcgccaccgtttgctgaacgttatcaactgtctgctgggtatgttcgttcagttcatcggtgcctttcgccagcgtctcactgccatttctgacactggacacctggctactgacatcgttaattagccaacggcacatcaggccaagttgccctaccgcacgtaatgtcagccccagctcatcgctgcgattcagatgctcaacactattacgttctccggtcgccaccttcagtgcctgatgggcaacattttctatcgggcgcacaatctgccattcaaaacaggcgcttgccaacaataccactaacgcacagaggatatacgtcaccaccggggcagcaacaaaccaaagcatggccgccagcaagataaacatcagggtcatcactccacgcgcccgccagcgaagcggtaaactaggcagtttacccagccagcctttacgcaccaccaggcctttatgaatacgcttactggtacgtccggcgttcaacgctttgtacagcggctccaccgccgcgatctcttcatccgtcgcccgggtacgaatgctcatatagccactgatttttccctcgcgcaccatcggtaccgcattggcccgcacccaataatggtcaccatttttgcggcgatttttcacgatgccgctccagggctccccttttttcagggtgaaccacatatccgcaaacgccgcttttggcatatccgggtgacgcaccatgttgtgcggctgcccttgtaactcttgcaaggtatagccgctcacctgcacaaaagtgtcattagcatgagtgatatagctttgcagatcggtagtggacatcagagtggtatcgtccgccagcggggtattttgctgggtgacatacggatgagaagacatgttcgcgtcctgtgcaggttatatggttgttaacttcttgtcagagtttatgtcggccccgctgcggttatctttaaccgattaatttgatttagatcgcaatttgcgatttaaacacaaatctaattccttgatttaaaatactttcactctgttactatacgaaaacgttaattatcttgcccaaaaatcaggcaattattgccctgaaaacgtgcatttgcgcagcaatcatcaaatccatacccgacaaaaaccgtgcaaaataacaacaaatgttaacagatagcattaaatattgcacaaatgataaccgaatttgtgtttatcccgattttcgcgatcgcagccggagtggcgcaatccctgcaatacttaaatcggtatcatgtgatacgcgagcctccggagcatattttgaacaggttacctagcagcgcaagcgctttagcgtgcagcgcccacgccctgaatctcattgagaagcgaacgctggatcatgaggagatgaaagcacttaaccgagaggtgattgaatacttcaaagagcatgtcaatccggggtttttagagtatcgcaaatctgttaccgccggcggggattacggagccgtagagtggcaagcgggaagtttaaatacgcttgtcgacacccagggccaggagtttatcgactgcctgggaggttttggaattttcaacgtggggcaccgtaatccagttgtggtttccgccgtacagaatcaacttgcgaaacaaccgctgcacagccaggagctgctcgatccgttacgggcgatgttggcgaaaacccttgctgcgctaacgcccggtaaactgaaatacagcttcttctgtaatagcggcaccgagtccgttgaagcagcgctgaagctggcgaaagcttaccagagtccgcgcggcaagtttacttttattgccaccagcggcgcgttccacggtaaaagtcttggcgcgctgagcgccacggcgaaaagcaccttccgcaaaccgtttatgccgttactgccgggcttccgtcatgtgccgtttggcaatatcgaagccatgcgcacggctcttaacgagtgcaaaaaaaccggtgatgatgtggctgcggtgatcctcgaaccgattcagggtgaaggtggcgtaattctgccgccgccgggctatctcaccgccgtacgtaagctatgcgatgagttcggcgcactgatgatcctcgatgaagtacaaacgggcatggggcgcacgggcaagatgttcgcctgcgagcatgagaacgtacagccggatatcctctgccttgccaaagcgctcggcggcggcgtgatgccgattggcgcgaccatcgccactgaagaggtgtttagtgttctgttcgacaacccattcctgcataccaccacctttggcggcaacccgctggcctgtgcggcggcgctggcgaccatcaatgtgttgctggagcagaacttaccggctcaggctgagcaaaaaggcgatatgttgctggacggtttccgtcaactggcgcgggaatatcccgatctggtacaggaagcgcgtggtaaagggatgttgatggcgattgagtttgttgataacgaaatcggctataactttgccagcgagatgttccgccagcgcgtactggtggccggaacgctcaataacgccaaaacgatccgcattgaaccgccactgacactgaccattgaacagtgtgaactggtgatcaaagcggcgcgtaaggcgctggcggccatgcgagtaagtgtcgaagaagcgtaatatcaaatcggatggcgatacgacgtcgccatccgatctttttatacgacgcgtacgcccgcaggcatcatccgctccggcgttaacagcacgctttcactgccgtcatcggtttccgcacacaacagcatgcattcgctcgtttcaccacgcattttcgctttttgcagattgcataagaccaccaccgttttccccatcagctcttcttcgctgtagtacggcaccaggctggtcacggtttgcagcgttttttgccccacatcaacctgtacgatgtacagcttgtcggcgttttcatggcgtttcacttccacaatctttccgacgcgcatttccagacgtgcaaaatcagcgtaagccacggtttccattgcttcctcccttagggtaaaattttactaaactatagcaaaagtttttctcaatcctgtaggctaaaaatggagaatgcaggcgtgatcacattcgtgagccgctgtgttaccgttacagcgtcaaagaaacgcgctttatttactgaaaacaggtgacccgataagcacttcctctacaatgggggcgcacatcagggaaagtaaaaaaggtaaacatggcaacactaaaagacatcgcaatcgaagctggcgtatccctggcgacagtatccagggtcttaaatgacgatccgacattgaatgtgaaagaagagacgaaacatcgcattctcgagatcgccgaaaagctggagtacaagaccagtagtgcccgtaaactccagacaggtgcagtcaaccaacaccatattctggctatctacagctaccagcaggagctggagatcaacgatccttactatctggcgatccgccacggcattgaaacccagtgcgaaaagctgggcatcgagctcaccaactgttatgaacacagcggcttaccagacattaaaaacgtcaccggtattttaattgtcggcaaacccacgcccgccctgcgcgccgctgccagcgcgttgaccgacaatatctgttttatcgactttcacgaacccggcagcggttacgatgcggtggatatcgatctggcacgcatcagtaaagaaatcatcgacttctatatcaaccagggcgttaatcgtattggttttattggcggtgaagatgagcctggcaaggcggatattcgtgaggtcgcctttgcggaatatggccgactgaaacaagtggtacgcgaagaggatatctggcgcggcggtttttccagtagcagcggttatgaactggcaaaacaaatgctggcgcgggaagactatccgaaggcactgtttgttgcttccgattccattgctatcggcgtactgcgggcaattcatgaacgaggcctgaacatcccacaggatattagccttatcagcgttaacgatatccccaccgcgcgatttacctttccgccgctctccaccgtgcgcatccattccgagatgatgggaagtcagggcgttaacctggtgtatgaaaaagcccgcgatggtcgcgcgctgccgctgttagtcttcgttcccagcaaattaaaactgcgcggcacgacccgttaaatccccttacacactgtccggcaatcgtttttgccggacagtgctgccgtttattttcgtgatccagttaaagtaaatgcatttacctgctactttttagtaaaaattttactaaactccccagcaattacacaaactaccatcaccatgaatggttccgatttctctctaccgggaggccctatgaatcgctgggaaaacattcagctcacccacgaaaaccgacttgcgccgcgtgcgtacttttttagttatgattctgttgcgcaagcgcgtacctttgcccgcgaaaccagcagcctgtttctgcccttaagcggtcagtggaatttccacttttttgaccatccgctgcaagtaccagaagccttcacctctgagttaatggctgactgggggcatattaccgtccccgccatgtggcaaatggaaggtcacggcaaactgcaatataccgacgaaggttttccgttccccatcgatgtgccgtttgtccccagcgataacccaaccggtgcctatcaacgtattttcaccctcagcgacggctggcagggtaaacagacgctgattaaatttgacggcgtcgaaacctattttgaagtctatgttaacggtcagtatgtgggtttcagcaagggcagtcgcctgaccgcagagtttgacatcagcgcgatggttaaaaccggcgacaacctgttgtgtgtgcgcgtgatgcagtgggcggactctacctacgtggaagaccaggatatgtggtggagtgcggggatcttccgcgatgtttatctggtcggaaaacacctaacgcatattaacgatttcactgtgcgtaccgactttgacgaagcctattgcgatgccacgctttcctgcgaagtggtgctggaaaatctcgccgcctcccctgtcgtcacgacgctggaatataccctgtttgatggcgaacgcgtggtgcacagcagcgccattgatcatttggcaattgaaaaactgaccagcgccagctttgcttttactgtcgaacagccgcagcaatggagtgcagaatccccttatctttaccatctggtcatgacgctgaaagacgccaacggcaacgttctggaagtggtgccacaacgcgttggcttccgtgatatcaaagtgcgcgacggtctgttctggatcaataaccgttatgtgatgctgcacggcgtcaaccgtcacgacaacgatcatcgcaaaggccgcgccgttggaatggatcgcgtcgagaaagatctccagttgatgaagcagcacaatatcaactccgtgcgtaccgctcactacccgaacgatccgcgtttttacgaactgtgtgatatctacggcctgtttgtgatggcggaaaccgacgtcgaaagccacggctttgctaatgtcggcgatattagccgtattaccgacgatccgcagtgggaaaaagtctacgtcgagcgcattgttcgccatatccacgcgcagaaaaaccatccgagcatcatcatctggagcctgggcaatgaatccggctatggctgtaacatccgcgcgatgtaccatgcggcgaaagcgctggatgacacgcgactggtgcattacgaagaagatcgcgatgctgaagtggtcgatattatttccaccatgtacacccgcgtgccgctgatgaatgagtttggtgaatacccgcatccgaagccgcgcatcatctgtgaatatgctcatgcgatggggaacggaccgggcgggctgacggagtaccagaacgtcttctataagcacgattgcattcagggtcattatgtctgggagtggtgcgaccacgggatccaggcacaggacgaccacggcaatgtctggtataaattcggcggcgactacggcgactatcccaacaactataacttctgtcttgatggtttgatctattccgatcagacgccgggaccgggcctgaaagagtacaaacaggttatcgcgccggtaaaaatccacgcgcgggatctgactcgcggcgagttgaaagtcgaaaataaactgtggtttaccacgcttgatgactacaccctgcacgcagaggtgcgcgccgaaggtgaaacgctcgcgacgcagcagattaaactgcgcgacgttgcgccgaacagcgaagcccccttgcagatcacgctgccgcagctggacgcccgcgaagcgttcctcaacattacggtgaccaaagattcccgcacccgctacagcgaagccggacaccctatcgccacttatcagttcccgctgaaggaaaacaccgcgcagccagtgcctttcgcaccaaataatgcgcgtccgctgacgctggaagacgatcgtttgagctgcaccgttcgcggctacaacttcgcgatcaccttcagtaaaatgagtggcaaaccgacatcctggcaggtgaatggcgaaagcctgctgactcgcgagccaaagatcaacttcttcaagccgatgatcgacaaccacaagcaggagtacgaagggctgtggcaaccgaatcatttgcagatcatgcaggaacatctgcgcgactttgccgtagaacagagcgatggtgaagtgctgatcatcagccgcacagttattgccccgccggtgtttgacttcgggatgcgctgcacctacatctggcgcatcgctgccgatggccaggttaacgtggcgctttccggcgagcgttacggcgactatccgcacatcattccgtgcatcggtttcaccatgggaattaacggcgaatacgatcaggtggcgtattacggtcgtggaccgggcgaaaactacgccgacagccagcaggctaacatcatcgatatctggcgcagcaccgtcgatgccatgttcgagaactatcccttcccgcagaacaacggtaaccgtcagcatgtccgctggacggcactgactaaccgccacggtaacggtctgctggtggttccgcagcgcccaattaacttcagcgcctggcactatacccaggaaaacatccacgctgcccagcactgtaacgagctgcagcgcagtgatgacatcaccctgaacctcgatcaccagctgcttggcctcggctccaactcctggggcagcgaggtgctggactcctggcgcgtctggttccgtgacttcagctacggctttacgttgctgccggtttctggcggagaagctaccgcgcaaagcctggcgagctatgagttcggcgcagggttcttttccacgaatttgcacagcgagaataagcaatgaggatcatcgataacttagaacagttccgccagatttacgcctctggcaagaagtggcaacgctgcgttgaagcgattgaaaatatcgacaacattcagcctggcgtcgcccactccatcggtgacagtttgacttaccgcgtggagacagactccgcgaccgatgcgctatttaccgggcatcgacgctattttgaagtgcattactacctgcaagggcagcaaaaaattgaatatgcgccgaaagagacattacaggtagtggaatattatcgtgatgaaactgaccgtgaatatttaaaaggctgcggagaaaccgttgaggtccacgaagggcaaatcgttatttgcgatatccatgaagcgtatcggtttatctgcaataacgcggtcaaaaaagtggttctcaaagtcaccatcgaagatggttatttccataacaaataacaactacggcggcaaaaggagtttgccgccaccgctaccctactcattttcggagatgtgttatgtctgataccaaacgtaatacaatcggcaaattcggcttgctcagcctgacttttgccgccgtttacagctttaacaacgttatcaataataatattgagcttggactggccagcgcaccgatgtttttcctcgcgacgattttttattttattcccttctgtctgatcatcgcagaatttgttagcttaaataaaaacagtgaagccggtgtctacgcgtgggtaaaaagtagcctgggcggacgttgggcatttattactgcctatacctactggttcgtaaacctgttctttttcaccagtctgttgccgcgcgttattgcttatgctagctatgccttcctcggatacgaatatattatgacgccggttgccaccaccattatcagtatggtgctgttcgccttctccacctgggtttccaccaacggggcgaaaatgttggggccaattacctccgtcactagtacgctgatgctgctgttaacgctctcctacattttactggcaggtacggcgctggttggcggcgtacagcctgctgacgccatcaccgttgacgcgatgatcccgaacttcaactgggcgttcctcggcgttaccacctggatctttatggccgcaggtggcgcggagtccgtcgctgtgtacgttaacgacgtcaaaggcggtagcaaaagcttcgttaaagtgatcatcctcgccgggatttttatcggcgtactgtattccgtctccagcgtgctgattaacgtcttcgtcagcagcaaagagttgaaatttaccggcggaagcgtgcaggtattccacggcatggcggcgtattttggtctaccggaagcgttgatgaatcgctttgtcggtctggtgtcctttaccgcgatgttcggttccctgctgatgtggaccgcaacgccggtgaaaattttcttctccgaaatcccggaaggcatctttggtaagaaaaccgtcgaactgaacgaaaacggcgttccggcgcgcgcagcgtggatccagttcctgatcgtcatcccgctgatgattatcccgatgctcggttccaataccgtgcaggatctgatgaatactattattaatatgaccgccgcagcgtccatgcttccgccgttattcatcatgctggcttacctgaatttacgcgccaaattagatcacctgccacgcgatttccgtatgggctcccgccgcaccggtattatcgttgttagtatgctgattgcgatatttgccgtagggtttgtcgctagcacattcccgactggcgcgaatattctgaccatcattttttataacgtcggcggtattgttatcttccttggctttgcgtggtggaaatacagtaaatatataaagggattaacggctgaagagcgccatattgaagcgacgccagccagcaatgttgattaagcagaataataaaaaatgagcaggcattttccctcttcctggatgaggagagggaaaatagtttctgcctttatatttttataattacaacgataaaaggctgtactttttctttagctcatggattaacacaatgaaattaatcactgcaccatgcagagcattacttgctctgccgttttgctacgccttttctgcggcaggagaagaagcacgtccggcagaacatgacgacacaaaaacacccgcaattaccagcacatcttctcctagttttcgtttttacggcgaattaggggttggtggatatatggatttagagggtgagaataaacataaatacagcgacggtacctatattgaaggtggcctggagatgaagtacggctcctggttcggcctgatttacggcgaaggctggaccgtgcaggccgaccacgacggcaatgcctgggtgccagaccatagctggggtggtttcgagggcggaattaaccgtttctatggcggttatcgtaccaatgatggcaccgaaatcatgctcagtctgcgtcaggattccagcctggatgacctgcaatggtggggcgatttcacccccgatctgggctacgtcattcccaatacccgcgacattatgactgcgctgaaggtacagaacttaagcggcaactttcgttatagcgtcaccgcgactcctgccggacatcatgatgaaagcaaagcctggctacattttggcaaatacgatcgctatgacgacaaatacacctatccggcaatgatgaacggttacatccagtatgaccttgccgaaggcatcacctggatgaacggtctggaaatcaccgacggcacaggacagctctatctcacgggcctgctaactcctaactttgccgctcgcgcctggcaccataccggacgcgccgacgggctggacgtaccgggaagtgaaagtgggatgatggtgagcgccatgtatgaagcgttaaagggcgtttatctctccaccgcttacacctacgccaaacatcgccctgaccacgctgacgatgaaaccacctctttcatgcagtttggtatctggtacgaatacggcggcggacgtttcgccacggcttttgatagccgcttctacatgaaaaatgcctctcacgatcccagcgaccaaatcttcctgatgcaatatttctactggtaataaggactgtaatttcatgaaaataaaaactattttaacgccagtaacctgcgctctgctgataagtttttccgcccatgccgctaacgccgacaattataaaaacgtgattaaccgtactggcgcgccgcagtacatgaaggattacgattacgacgatcaccagcgttttaatccgtttttcgatctcggagcctggcatggtcatctgttgccagacggccctaacaccatgggcggctttccgggcgttgcgctgctgacggaagagtacatcaactttatggccagcaatttcgaccgcctgaccgtctggcaggacggcaagaaagtcgactttacgctggaggcatacagtattcccggtgcgctggtgcaaaaactgacagcaaaagatgtgcaagtcgaaatgactctgcgcttcgccacgccgcgcacgagtctactggaaaccaaaatcaccagcaataaaccgctggatctggtgtgggacggcgaactgctggaaaaactggaagcgaaagaagggaaaccgctttccgataaaaccattgctggcgaataccctgactatcagcgcaaaatcagcgccacccgtgatggcctgaaagtcacctttggcaaagtgcgcgccacctgggatctgctgacctccggcgaaagcgaatatcaggtgcataaatccctgccggtgcagactgaaatcaacggtaatcgctttaccagtaaggcgcatatcaacggtagcaccacgctctacaccacctattcccatctgctgaccgctcaggaagttagcaaagagcaaatgcagatccgcgatattctggcgcgtccggcgttttatctcaccgccagccagcaacgctgggaagaatacctgaagaaagggttaaccaatccggatgcgacgccggaacagacgcgcgtcgcggtgaaagcgatcgaaacgctcaacggtaactggcgcagtccgggcggtgcggtgaaatttaacaccgttacaccgagcgtgaccgggcgctggttctccggcaatcagacctggccgtgggatacctggaagcaggcgtttgcgatggcgcatttcaatccggacatcgccaaagagaatatccgcgcggtcttctcctggcagatccagcctggcgatagcgtgcgtccgcaggatgtgggctttgtccccgacctgatagcgtggaaccttagccccgagcgtggtggcgatggcggcaactggaacgaacgtaataccaaacccagccttgccgcctggagcgtgatggaagtgtataacgtcacccaagataaaacctgggtggcagagatgtacccgaaactggtggcctatcacgactggtggttacgtaaccgcgatcacaacggcaacggcgtgccggaatatggcgcgacccgcgacaaagcccacaacactgagagcggcgagatgctgtttacggtgaaaaaaggcgataaagaagagacgcagtctgggctgaacaactacgcccgcgtggtggagaaaggccagtacgacagtctggaaattccggcacaggttgctgcaagctgggaaagcgggcgtgatgatgccgccgtctttgggtttatcgacaaagaacagttggataaatatgtcgctaatggcggcaaacgtagcgactggacggtgaaattcgccgaaaaccgcagtcaggacggaacgttgctgggctacagcctattgcaggagagcgtggatcaggccagctatatgtacagcgataaccattatctggcggagatggcaaccatcctcggtaagccagaagaggccaaacgctatcgccagttggcacagcagctcgcggactacatcaacacctgtatgttcgacccgactacccagttctactatgacgtacgtattgaagataaaccactggcgaacggctgcgcgggcaaaccgattgttgagcgcggtaaagggccggaaggctggagcccgctgtttaacggtgcggcaacgcaggccaatgccgacgcggtggtgaaggtgatgctcgatcctaaagagttcaacacctttgtcccgctgggaacggcggcgttaaccaatccggcttttggcgctgatatctactggcgtgggcgcgtatgggtggatcagttctggtttggtctgaaagggatggagcgttacggttatcgtgatgatgccctgaagctggcggatacgttcttccggcacgccaaagggttaaccgccgatggaccaattcaggaaaattacaacccgctgacaggcgcacagcaaggcgcaccaaatttctcctggagtgccgcgcatttgtatatgttgtataacgattttttccgtaagcaataatttgcaactgctggcggatgcggcgtaaacgccttatccgccctacatgtgcaatcctcctggccggataaaacgcggcaagcgttgcatccggcaactgcaccgcgccactggcggatgcggcgtgaacgccttatccgccctacatgtgtgttcccgtaggtcggataagacgcgacaagcgtcgcatccggcatctgcaccgcgccactggcggatgcggcgtggacgccttatccgccctacatgtgcaattccgtaacctggataaaacgcgacaagcgtcgcatccggcgttatcaccgggcgtattctttttgaatcccatcacaaaccccgcactccccttttcccttttctccggcgacggctaaattagaactcatccgaccacataacaattattttacatactggacaattttatgagctacccgagcctgttcgccccgctggatttaggttttaccacgttaaaaaaccgcgtgttgatgggcagtatgcacaccgggctggaggaatacccggacggtgccgagcggctggcagcgttttatgccgaacgcgcccgtcacggcgtggcgctgattgtcagcggcggcattgcaccagatttaacaggcgttggcatggaaggtggcgcaatgctcaacgacgccagccagatcccacaccatcgcaccattaccgaagcggtacatcaggaaggcggcaaaatagccctgcaaattttgcataccgggcgctacagctaccaaccgcatctggtcgccccgtccgcattgcaggcccccatcaaccgtttcgtgccccatgagttaagccatgaagagatcctgcaactgatcgacaatttcgcccgctgcgcgcaactggcgcgggaggcaggatacgacggtgtagaggtgatgggttccgaagggtatttgatcaacgaatttctgacgctgcgcaccaatcagcgtagtgaccagtggggcggcgattaccgcaaccggatgcgatttgccgtagaagtagtgcgtgcggtgcgcgaacgcgtcggcaacgacttcattattatctaccgactgagcatgctcgacctggtcgaagacggcgggacttttgccgaaacggtagagctggcgcaggccattgaagcggcgggcgcgaccattatcaacaccggcattggctggcatgaagcacgtattccgaccattgccacgcccgtgccgcgcggcgcatttagctgggtcacgcgcaaactgaaaggccacgtcagcctgccgctggtaaccaccaaccggattaacgatccgcaggttgccgacgatattctcagccgcggcgatgccgatatggtaagcatggcgcgaccgtttcttgctgatgcggagctgctgagtaaagcgcaaagcggacgagccgatgagatcaacacttgtattggctgcaatcaggcctgtctcgatcaaatcttcgttggcaaagtcaccagctgcctggtgaatcctcgcgcctgccacgaaaccaaaatgccaatccttcccgccgtgcagaaaaaaaatctggcggtggtcggtgcgggacctgctgggctggcgtttgccattaacgcggcggcgcgtgggcatcaggtaacattgtttgacgctcatagcgagattggcgggcagtttaatatcgccaaacagatccccggcaaagaggagttttacgaaacgctgcgctattaccgccggatgatcgaagtgacgggcgtgacgctaaaactcaatcacaccgtgacggcggatcagttacaggctttcgatgaaacgatcctcgccagtgggatcgtgccgcgcactccgcccatcgacgggatcgatcatccgaaggtattgagttatctcgatgtactgcgcgacaaagcgccggttggcaacaaagttgccatcatcggttgtggcgggattggttttgatacggcgatgtatttaagtcagccgggcgaatccaccagccagaatatcgccgggttctgtaatgaatgggggatcgacagtagcctacaacaggctggtggcttaagcccgcagggaatgcagatcccccgtagcccacggcagattgtgatgctccagcgcaaagccagcaaaccaggacaggggttaggcaaaaccaccggctggatccatcgcaccaccctgctcagccggggtgtgaaaatgatcccaggcgtaagttatcagaagattgacgatgacgggctgcatgtggtgatcaacggcgaaacgcaggtattagcagtggacaatgtggtgatctgcgcagggcaagagccaaaccgcgcgctggcgcaaccgctgattgatagcgggaaaacggtgcatttaattggcggctgcgatgtggctatggagctggacgcacgacgggcaattgcccagggaacacggctggcgctggagatttaaatcgttatttgaagcgccggatgcaacgcatccggcacgtcgcgttaatcaataaacaaggcgggagaaatgccgaatcgcgttgccaattttttagcgtgttccagcgttaatttcctcttcccgctcaaaacgcgactcaccatagatttactgccaatttccggcagatcggaaagggttaaaccatattgatccataagggtacgaatcacggctataccgccaggcatggcttgagccatggcattaaattccgcaaattcgggcgcactttcttcccacgcggttattttggcacacaccagatccagcaaggggttttcaggatcgttgagcagcagatgatctaccagttccagcgcctgggtgtattgttcctcgttctgaatacccgccagaaaaggtgccacagcagttagcttttctcctgcttgcaagatgtcggcaatcgcaatcattttttccccttagtacgatgaacagcggtaaagaaatcgtattctttatgcgtcataacttcacgtatgtagcacttttggctttcaaaaaagaccattgctacaacacgtaattcattgcccccaacattgaaaacataatgcttatccagatatttgaagttatccagagatgggaatactgcttttaaactctcaggttttttgaaatatcccttagcaatcgtgttccccagagccaccaactccgttttatgttgcgggtatttttccgcagcatctttcaatgctttttgagttatcaggtgcattcttcatcacgtccgttgacaaattggcaatatgataacatccgttgccagattggcaacggatgaatttatctgtgtgacggaagaataaacgtagaaaaacgctaaacaagagaatgtagacgatggtgacagggattttttgttttatggaagcgcgattccagaactgggcagacattgccggatgcgacgcttgccgcgtcttatccggcctggagtaacgtgctgaacgtaggccggataaggcgtttacgccgcatccggcaggtaactcccaatcttaccgacgacgtcccagcttcaccgctttcagtaccacaaatttattattcgtcgcaatagtggtgcagttgccgaaaatcttcttcagtttatggaagtaatccaggtgacggttggcaacgatatacagctcgccgttgattttcaggcagcggcgggcgtggtggaacatctcccaggcgacgttatcggtcagcgcatgttgttggtgaaacggcgggttgcagagcacagcattaaagcggaaaggctccacgccggagagcgcgttgttgatcataaactcgcagcgatccaacgcctctggcatgttggtttcaacgttcaaacggctggaagcaaccgccatcgggctttcatcgacaaacaccactttcgcctgcgggtttttatcaagcagcgtcagaccaataacgccattaccgcaaccgagatcgacaatctccccttcgagattctctggcagatgttgcataaagaagcgcgcgccgatatcaagcccggtgcgggagaagacattcgcatggttgtggatagtccagtcagtaccttccagcttccagctaacggtctgcggcgcatcggccagctgcggttcattgaaagtgcaattaatcaggcgcgcttttttccatgccagcgtggtggtggttgggccgagcactttttcgaacagttccagcgtggaagtgtgaatgtcacgggccttggcaccggcaataatacgtgtatcgctcgtgaccactttgcgcagcgcacgcagttgctgttccagcaatgccagtgttttcggcactttgatcagcaccacacccggctgttgcgggtagtcggcggtgctgtcgagaaacttcacgctgctctcatcaatcccgttgaggcgtaaattctcgcgcgtcgccagttcactgatgtaactgtcgccaatgctgtacggcttatgttccgccagtgcgcagcttaacgcaccaaaggcatcattcaggatcaacaccgggccgcggatttctgtgtcgtccaactgttgcagcaaatattcatccgccgcttcccacgcctgtagcgggttaacgtcatccgtcgccggaaaacgttgtagtgtcagactacggaaaccgttgtctaagtggctcatcggccctcctgaatgataaaatttcgacattgcccctgaaaagggtgcgtgagtataccctttttctctttttcgtgggcggttatgagcaatcttacttatcttcagggttatcccgagcagctactttcccaggtgcgaacactgattaacgaacagcgtctgggcgatgtgctggcaaaacgctatccgggaacacacgactacgccaccgataaagccctctggcaatatactcaggatctgaaaaatcagtttctgcgtaatgccccgccgatcaataaagtgatgtatgacaataagatccatgtgctaaaaaacgcgctcgggttacataccgctgtttctcgtgtgcagggcggcaagctgaaagcaaaggtggagatccgcgtcgctaccgtgtttcgcaacgcgccggaaccgtttttgcgcatgatcgtggtgcacgagctggcgcacctgaaggagaaagagcataacaaagcgttttaccagttgtgttgtcatatggaaccccagtaccaccagcttgagttcgacacccgactgtggctaacgcagttgagccttgggcagaacaaaatctgaaaatgatgtcaggcgttatcttttctttctttagcgcctaaaatcgacctcccccctttcgttaaggataacgaccatgctgcgcgcatttgcccgccttcttctccgtatttgtttttctcgccggactctaaagattgcctgcttactgttacttgtggcaggagcgaccatccttatcgccgatcgcgtaatggtcaacgccagcaaacagctgacctggagcgatgtcaacgccgttccggcgcgtaacgtgggtttattgctgggggcgaggccgggtaatcgctactttacccgacgtattgataccgcagcagcgttgtaccacgccggaaaagtgaaatggctgctggtaagtggcgataacggacgtaaaaattacgatgaagcaagtggtatgcagcaggctttgatcgctaaaggcgtaccagcaaaagtgatcttctgcgactatgccggattcagtacgctggatagcgtagtgcgtgccaaaaaggtttttggtgaaaaccatatcaccattatcagccaagaatttcataatcaacgcgccatctggctggcaaaacagtacggcatcgacgctatcggttttaacgcgccagacctcaatatgaagcacggtttttatactcaactgcgggagaaactcgctcgtgtcagcgccgtgattgacgccaaaatcctccatcgccagccgaaatatctcgggcctagcgtcatgattgggccgtttagtgagcatggctgtccggcgcagaaataatgcgtatctgcgcacgtcgaagatgaaaaaggcgtgctacattgacgacagaatccctttatggagtatccacgcgttatgatacgtttcgctgtgattggtacgaactggatcactcgccagttcgtcgaggccgcccatgagagcggtaaatacaagttaaccgccgtatattcccgcagccttgaacaggcccagcacttcgccaatgatttttctgtcgagcatctgtttaccagcctggaagcgatggcggaaagcgatgccattgacgcggtgtatattgccagcccgaattccctgcatttttcccagacacaacttttccttagccataaaattaatgtgatttgcgagaaaccgctggcgagcaatctggcggaagtggatgccgccattgcctgtgcgcgggaaaatcaggtggtgctgtttgaggcatttaaaaccgcctgcctgccgaactttcatttgttgcgccaggcgctgccgaaagtcggcaaactgcggaaagtctttttcaactattgccagtattccagccggtatcaacgttacctggatggtgagaatcccaacacctttaatccggcattctctaacggtagtattatggatatcggtttttactgtctggcgagcgcggtggcgttatttggtgagccgaaaagcgtgcaggcaaccgccagtttgctggcaagcggcgttgacgcccagggcgtggtggtgatggattacggtgatttcagcgtcaccttgcagcacagtaaagtcagtgattctgtcctggcgagcgagattcagggcgaagcaggaagcctggtgattgaaaaactgtctgaatgccagaaagtgtgcttcgtgccgcgtggcagccaaatgcaggatctcacccagccgcagcatattaataccatgctctacgaagcagagctgttcgctaccctggtggatgagcatctggtggatcatccagggctggcggtcagtcgcatcaccgccaaactgctgaccgagatccgccgccagactggggtgatttttccggcagatagcgtaaaactataattgccaaagtaaaacagtgtaaaaggtatgtaacagaccattgactggctgaatggtctgtcatactttgttacctgcaaaggggagtaacttcattgccggtcgatcgtcattacgatgtgtgaaaaaacacatccggtcaccgggcaacccgaaaggaatacgcagacgtattccttttttgttgtaagtgagaccttgccggaaggcgaggtctatgcataaaaagcagcggctgacgtcttccgacgttggccgtttttttatgtgtaaggaacttctatgaatactgtcggcacgccgttgctatggggcggattcgctgttgttgtcgccattatgctggctatcgacctgttgttgcaggggcgtcgtggggcacatgccatgaccatgaaacaggctgcggcctggagcctggtctgggtgacgctgagcttactgtttaacgccgctttctggtggtatctggtgcaaaccgaaggtcgcgccgttgccgatccacaggcactggcctttctcacaggttatctgattgagaaaagcctggcggtcgataacgtctttgtctggctgatgttgttcagctatttctctgttccggcggcattacaacgccgcgtgctggtgtatggcgtgctcggggcgattgttctgcgtaccatcatgatcttcactggcagctggctaattagccagttcgactggatcctgtatatcttcggtgccttcctgctgtttaccggcgtgaagatggcgctcgcccatgaagatgaaagtggcattggcgacaagccgctggtgcgctggctacgcggtcatttgcgcatgaccgacaccatcgacaacgagcatttctttgtgcgtaagaatggattgctgtacgccacaccgctgatgctggtactgattctggtggaattgagcgacgtgattttcgccgtggatagcattccggctatcttcgccgtgaccactgacccgttcattgtgctgaccagtaacctgtttgcgatcctcggcctgcgtgcgatgtatttcctgctggcgggcgtagcagagcgtttcagcatgctcaaatatggcctggcggtgattctggtgtttatcggtatcaagatgctgattgtcgacttctaccatattccaatcgccgtcagcctgggcgtggtgtttggcattctggtgatgacgtttattatcaacgcctgggtgaattatcggcatgataagcagcggggtggataatttttaatctgcctaagccgtgtaccctgtcattaacatgagcaccgttttctccctctcccttccagggagagggtcggggtgagggtaatttttcgcaccgatgctggcctgttcccctcaccctaaccctctccccaaacggggcgaggggactgaccgagtccttttttgatgttgtcatcagtctggaagccgcacgttggctttatttttatgtcaaagaaatgtaaccattaagtttcaaaatatgacctctctttaaaatccagcatttttcgcttcccgaagctgtaactttccttatactcgaccttgcaaacactttgttacatcctgaaagatgcgtcgacagaacgcaccagggatgtgcgacaacacaatgaaaggatcgaaaaatgactacgcaacgtagtccggggctattccggcgtctggctcatggcagcctggtaaaacaaatcctggtcggccttgttctggggattcttctggcatggatcagtaaacccgcggcggaagctgttggtctgttaggtactttgttcgtcggcgcactgaaagccgttgcccccatcctggtgttgatgctggtgatggcatctattgctaaccaccagcacgggcagaaaaccaatatccgccctattttgttcctctatctactgggcaccttctctgctgctctggccgcagtagtcttcagctttgccttcccttctaccctgcatttatccagtagcgcgggtgatattagcccgccgagtggcattgtcgaagtgatgcgcgggctggtaatgagcatggtttccaaccccatcgacgcgctgctgaaaggtaactacatcgggattctggtgtgggcgatcggcctcggcttcgcactgcgtcacggtaacgagaccaccaaaaacctggttaacgatatgagcaatgccgttacctttatggtgaaactggtcattcgcttcgcaccgattggtatttttgggctggtttcttctaccctggcaaccaccggtttctccacactgtggggctacgcgcaactgctggtcgtgctggttggctgtatgttactggtggcgctggtggttaacccattgctggtgtggtggaaaattcgtcgtaacccgttcccgctggtgctgctgtgcctgcgcgaaagcggtgtgtatgccttcttcacccgcagctctgcagcgaacattccggtgaatatggcgctgtgtgaaaagctgaatctggatcgcgatacctattccgtttctattccgctgggagccaccatcaatatggcgggcgcagcaatcactattaccgtgttgacgctggctgcggttaatacgctgggtattccggtcgatctgcccacggcgctgctgttgagcgtggtggcttctctgtgtgcctgtggcgcatccggcgtggcgggggggtctctgctgctgatcccactggcctgtaatatgttcggtattagcaacgatatcgccatgcaggtggttgccgtcggctttatcatcggcgtattgcaggactcttgcgaaaccgcgctgaactctagtactgacgtgctgttcactgcggcagcttgccaggcagaagacgatcgtctggcaaatagcgccctgcgtaattaattgtttaacccctttcgtctacggcggaaggggttttctcaactttaaacggatcaattccccttttctgcatccgccagaaacgaatgatattcaggccattcataagcagaaaactaccctcaatcatcgtgccgcctatgctccccgcccagaagttgtgaatcacccagcaacacgtactaaaccacattacgcagcgcatggtcagccctttacagcagaatagcgcccaggtactgacaatcgtgccgataaccggcaatagttcgacaggatgatggaacttcgcgaggccaattccgccagtcagcacaataaaaatcgccattacccataagctgcgcgtgcgtaaggtaatcaatgtacgaatggcattaaggatggcactggcaccagcgggataggtgcccagaagaaaaaaatgtacgccaataacggcgctatagacgctaagctgctttttgaagcgacgttcgtcacgattgaaaaatgttgtgataccaatcagaaaggcgatgacacccacgccctgggccagccaatacgcggtcatgataaatccttagcaggtatggaaaagcaaacggcgcttcacattatgaaacgccgttttttattaacaactcatttcgactttatagcgttacgccgcttttgaagatcgccagttcgcggaagtcgttacgctcgttacaggtttgcttaccgttggcaaactcaacgatggtgtcgataaattcttccagcaactgcggcatcgctttaccgtggatcaactgacccgcgtcaaagtcgatccagtgttttttcttcgccgccagttcactgttggtggcgattttcaccgtcggcacaaatccaccatacggcgtgccacgaccagtactgaacagcaccatatggcagcccgcacccgccagggcgctggtcgctacggcatcgttacccggcgcacttaacaagttcagccctggcgttttcagacgctcgccgtaacgcagcacgtcaaccacgacgctggaacccgctttctgggtacagccaagacttttgtcttccagcgtggtgataccgcccgctttgttccccgggcttgggttttcatagatcggctgatcatgggcaataaagtactgtttgaagtcgttgaccatggtgaccagtttttcaaacgttgcttcgtcgcggcaatggtccatcagcaactgctctgcgccaaacatctccggcacttcggtcagtacggtagtaccgccgttagcaatcacgtagtcagagaaacgccccagcatcgggttagcagtaataccagaaagaccgtcagaaccaccgcactccagaccaaacttcagttcgctgagtttgcctggctcgcgtttatcgttgcgcatcacgttatacagctgatgcaaatgctcgattccggcttcgatctcatcatcctgctgttggcagatcatgaaatgaacgcgttcaggatcgatatcgcccagcgtttcacggaatgcggcaacctggttgttttcacagcccagaccaatcaccagcactgcgcctgcgttcgggtggcgcaccatgttttgcagcatggtgcgggtattaatgtgatcgtcgcccagctgactgcagccgtaggtgtggctgaagaggaacacgccgtcagtaccttcggcgttgttggtctctttcagaaaacggttctggatctgccgcgcgatgccgttgacacagcccacggttggcaggatccacagctcattacgcaccccgacatcgccgttagcgcgacgatagatctgcacttcacgatctgccgcttgcgcaggcagatcctgaaaatcaggttgatagcgatactgatccagatcgctcagattcgtgcgcgtattgtgggcgtgaacgtgaacacctgccgcaatatccgccaatgcataaccaatcggcaggccatatttgatgacattggccccttttgcgatatccgttaacgcaaatttatgtccacgagcaacatcctggcgcagcgtaacagtctggttatcgacactgacttctgtgccttcagccaaatctgctaaagcgaccgcgacgttatccagcgcatggatcttgatgtattgcatatcaaccccagaccttagttcagttcaatggcgaagtagtcacgcgcattgttaaagcaaatatttttcaccatctcgcccagcaggttgatgtccgccggtgcttcgcccgcttccacccagcgaccgatcatctggcacagaatgcggcggaagtattcgtgacgggtgtaactcaggaagctacggctgtcagtcagcataccgacaaagcggctcagcagaccgagctgcgccagttgggtcatctgacgttccataccgtctttctgatcgttaaaccaccagccggaaccgaactgcattttgcccggcataccttcgccctggaagttaccgatcatggtgcccagcacttcgttatcgcgcgggttcaggcagtacagaatggttttcggcagcaggttttcttcattctgcttgctcagcaacttagacagctcttccgccatcggacggtcgttgatggagtcaaagcctacatccggccccagcagtttgaactgacgcaggttgttattacgcagcgcgccaatgtggtactgctgtacccagccgcgacgtgcatattcggcaccaaggaacaccagtaccgcagttttgaactgcgccacttcgtgctcgctcagggtttcgccagccagacggcgcgccagaatgctgtccagttccgcttcgttcgcttcagcaaacatcaccacatccagcgcgtggtcagacactttacagccgtgagcggcgaagtgatccagacgtttggtcagggcagtttgcaggtcagcaaagcggcgaatgtcggtatcggaaacttcgcccagcttcgccatgtagtcgttaaaggtcgcctgttcgatgttgaaggctttgtccggacgccagctcggcagcactttgatggtgaaagagccgtctttggcgatctctgcgtgatgctccagagaatcgatcgggtcatcggtggtgccgaccattttcacgttcatctgctgcatgatgccgcgcgcggagaagttatcctgcgccagcagttcgttacattcgttccagatttcatcggcagtactcggagaaagcaatttgccagtgataccaaacggacggcgcagttcgaggtgcgtccagtggtataacgggttgccgatagtgtgcggaacagtcgccgcccaggcgtcaaatttttcacggtcagacgcatcaccggtacacagacgctcggccacaccgttggtacgcatagcgcgccatttgtagtgatcgcctttcagccagatgtcatacaggtttttaaaacgatagtcttccgcaatctgctgcggcggcaaatggcaatggtaatcgaaaatcggctggtcttttgcgtagtcgtgatacagacggcgggcaaattcggtatctaacaggaaatcttcagtcataaacggagtcattttcgtcttcctctcaacgagtgagctagcttgcttatggtgcgatgctgacaaagttatcacaccaatttccagagtccgaagatattttcgtgagttagatcaataaacgtagttaaaaaaattactctcaaagtggtaaatctcgctgcaggccgcgccagtactggccttgctgtcgtcaggtaatgtccctacaaatattcccacatttgtgatggctctcaccttttaaagttgtatgacaagttatctttctgccgtcgcaaatcataagtcgacggaatgcaaattgccgattcattcatttgttagatgaatcgggttaaccggtacggaagccgaattagcacgaaactttcatggcaacgttcggggcgtgccggttttttttcggttacccggtcgtaactaacatcttcagcctctggcgggatgatggccgcgcttcctgcggatataacaaaacgatgaggttttacatgcgtaaaattaaagggttacgttggtatatgatcgcactggtgacgctcggcaccgtgcttggttacctgacgcgtaacactgtggcggcagctgcgccaactctgatggaagagttaaacatctccacccaacagtattcctatatcatcgcagcctattctgctgcttatacggtcatgcaaccggtagcaggttatgtactggatgtgctgggtacgaaaatcggttatgcaatgtttgctgtgctgtgggccgtgttctgtggtgcaaccgcgctggcaggtagctggggtggcctggctgttgctcgtggtgcggtcggtgccgcggaagcagcgatgatcccggcgggtctgaaagccagctccgaatggttcccggcgaaagagcgttccatcgcagtaggctactttaacgtaggttctagcattggtgcgatgattgcgccgccgctggtggtatgggcaatcgtaatgcacagctggcagatggcatttatcatctccggtgcattgagctttatctgggcgatggcatggctgattttctataaacatccgcgcgaccagaagcatctgaccgatgaagaacgcgactatattattaatggtcaggaagcccagcaccaggtgagcacggcgaagaaaatgtccgttggtcagatcctgcgtaaccgtcagttctggggtatcgcgctgccgcgtttcctggcagaaccggcctggggtacttttaacgcgtggatcccgctgttcatgtttaaagtttacggctttaacctgaaagagatcgcgatgttcgcctggatgccgatgctgtttgctgacctcggttgtatcctcggtggttacctgccgccgctgttccagcgttggtttggtgtgaacctgatcgtttcccgtaagatggtcgtaacgctgggtgcagtgctgatgattggcccgggtatgatcggcctgttcaccaacccgtatgtcgcaattatgctgctgtgtatcggtggttttgcccaccaggcactgtctggcgcgctgattacgctctcttccgatgtgtttggtcgtaacgaagtggcaacggcaaacggtttaaccgggatgtccgcatggctggcaagtacgctgtttgcgctggttgtcggtgcactggctgacaccatcggcttcagcccgctgttcgcagttctggcagtgttcgacctgttaggtgcgctggttatctggaccgtgttgcagaacaaaccggcgattgaggtggcgcaggaaacacataacgatcccgcaccgcaacattaacgtttcgtgtaagttttagtttcccttcaaagccgccttctcaggcggctttttcatcactgcgagtagagctaaactcgcaaaagtggtataacaaatatagtctgccgtatcatgcctggagcgcatatggaaatcactgaaccacgccgtttgtatcaacaacttgccgctgacctgaaagagcgcatcgaacagggcgtctatctggtgggtgataaactgcctgcagaacgctttattgccgatgaaaagaacgtcagccgtacggtagttcgtgaagccatcatcatgctggaagttgaaggctatgtcgaagtgcgtaaaggtagtggtattcatgtggtttccaaccagccgcgccatcagcaggcggctgacaataatatggaattcgccaattacggtccgtttgagttgcttcaggctcgccagctcatcgaaagtaatattgccgaattcgcggcaactcaggtaacgaaacaggacatcatgaaactgatggccattcaggaacaggcgcgcggcgaacaatgcttccgtgattccgagtgggatttgcagttccacattcaggtcgctctggcgacgcagaactccgccctggcggctatcgtggaaaaaatgtggacccagcgtagtcataacccgtactggaaaaaactgcacgaacacattgattcccgtaccgtcgataactggtgtgatgaccacgatcaaatcctcaaggcgctgattcgcaaagatcctcatgctgctaagctggcaatgtggcagcatctggaaaacaccaagatcatgttatttaacgaaaccagcgacgacttcgagttcaatgccgaccgctatctattcgccgaaaacccggtggtgcatctcgatacagccaccagcggcagtaaatgaaattcctgtccgacaggcgctgcaatgcgcctgtttgtctcgtcggtaagcgaaaagtataaagtgtcagcctgtgtaaatcctctcgccaccctcccctgcattcagcaaaatcagactccacggacatgtaattttgataacgaacaacgttgacctttgttacaattagattcaatttgaatttatgtttttgaatgctttcttatctcacgatttaacagggaatagttcaggctgtgttgatgtatcaaacccgcagaacataccaaaacagcaataacattgcggtagtgcatcttttaaaaccagcgtggcgttaaccgattcaccaggaataatgaatggaacttttgacccaattgctgcaagccctgtgggcgcaggattttgaaaccctggccaatccaagcatgattggcatgttgtattttgtcttgtttgtaattttgttccttgaaaacggcttgcttccggcggcctttttaccgggcgacagtttactggtattggtcggcgtgttgattgcgaaaggcgcgatgggctatccgcaaacgattctgctgctgaccgttgccgccagcctcggctgctgggtcagctatattcaggggcgatggctgggcaatacccgcaccgtacaaaactggctatctcatttacccgcgcattatcatcaacgcgcacaccatctttttcataaacacggtttaagcgcgctgttaattggtcgctttattgcgtttgtcagaacactgctgccgacgattgccgggttaagtgggctgaataacgcgcgctttcagtttttcaactggatgagcggtctgctgtgggtattgatcctgacaactctgggttacatgctcggcaaaacgccggtatttttaaagtacgaggaccagctgatgagttgcctgatgctgctcccggtggtgctgctggtgtttggcctggcaggttctctggtcgtgttatggaaaaagaaatatggaaatcgggggtaagggatgcaaatacctcgcatgagccttcgccagctagcctggtccggcgctgttttacttctggtcggcacgctgttgctggcctggtccgcggttcgccagcaagagtctacgctggcgattcgtgccgttcatcaaggcacaacgatgccagacggttttagtatctggcatcaccttgacgctcatggcattcctttcaaaagtatcacccccaaaaacgacactctgttaattacatttgactccagcgaccagagcgccgccgcaaaagcggtcctcgacagaacattgccccatggctacatcattgcgcagcaggacaataacagtcaggctatgcagtggctgacccggttacgggataactctcatcgcttcggataacttcctgttatccgaaacatatcactcactttggtgatttcaccgtaactgtctatgattaatgaggcggtggttaacactaccgcttcgttgtctggacaatcgttcctttgtaataggtccgaatcacaatggaaggttcaagaatgaaataccgcatcgctttagctgtttctctctttgctcttagtgccggtagttatgccactaccctgtgtcaggaaaaggagcaaaatatccttaaggagatcagctatgccgaaaaacaccaaaaccagaatcgtattgacggtctgaataaagccctgagtgaagtccgggccaactgtagtgatagccagctgcgtgccgatcatcagaagaaaatcgcaaagcagaaagatgaggtggcggaacgccagcaagatttagccgaggcgaagcaaaaaggcgatgccgataagattgccaaacgcgaacggaaactggcagaagcgcaggaagagctgaaaaagctggaagcgcgcgactactaactcacaatagtcactacttactcacctggagaaaactatgagcaaagaacacactacggaacatctgcgtgctgagttgaaatccctttccgatacgctggaagaggtgcttagcagttctggcgagaagagcaaagaagagttgagtaagattcgtagcaaagcggagcaggcactgaaacagagccgttatcgcctgggtgaaaccggtgatgccattgccaaacaaacccgtgtcgcggcggcgcgtgccgatgagtatgtgcgcgaaaatccgtggacgggcgtgggcattggcgctgcaatcggtgtagtgctcggcgttctgctgagccgtcgttaattatggcggacactcatcacgcacaagggcccggtaaaagcgttctgggcatcgggcagcgaattgtttctatcatggttgaaatggtagagacacgtctgcggctggcggtggtggagctggaagaggaaaaagcgaatctctttcaacttttactgatgctgggcctgacgatgcttttcgctgcatttggtcttatgagcctgatggtgctaattatttgggcggttgacccgcaatatcgcctgaatgcgatgattgccaccaccgtggtgttgctgctactggcactgattggcggtatctggacgctacgtaaaagccgtaagtctacgttgctgcgccatacacgccatgagttagcaaacgatcggcagctgctcgaggaggagtcccgtgagcagtaaagtcgaacgtgaacgacgtaaggcgcaactgcttagccagatccagcaacaacggctggatctttccgccagtcgtcgtgaatggctggagacaacaggcgcttacgatcgtcgctggaatatgctgctaagtctgcgctcctgggcgctggttggcagtagcgtgatggcgatctggacgattcgccatcctaatatgctggtccgctgggccagacgcggttttggcgtatggagcgcctggcgtctggttaaaacgaccctcaagcagcaacagcttcgcggttaacttccctctggccggagccattccggccttatccctcaaattttttgaagatttttgacagttttccttgctaacaatcatcattcaccacgtttatgattctctccatcgacagcaacgacgctaataccgcgccattgcacaaaaaaacaatcagcagcctgagtggcgcagtggagagtatgatgaaaaaattagaagatgttggtgtactggtagcgcgcattttaatgccgattctgtttattaccgctggctggggaaaaattactggctacgcgggtacccaacaatatatggaagcaatgggcgtcccgggttttatgctgccactggtgattctgcttgagtttggtggtggtctggcaatcctgttcggtttcctgactcgcaccacagccctgtttactgcgggctttacgctgctgacggcatttttatttcacagcaactttgctgaaggcgtcaacagcctgatgttcatgaaaaacctgacaatttctggcggattcctgctgctggcaattaccggtccgggcgcgtatagcatcgaccgcctgctgaataaaaagtggtaagcacgcgctatacttaacgataaaaaacgaggaggaagctcctcgtttttgctattggaggagagaaaaatgggtcaactgattgacggcgtctggcatgacacctggtacgataccaaatctaccggcggtaaatttcaacgtagtgcttccgcatttcgtaactggctcactgccgatggcgctcctggccccactggcacaggcggttttatcgcagagaaagatcgttatcatctctatgttagtctcgcctgcccgtgggcgcaccgcacgctgatcatgcgcaaactcaaaggactggaaccgtttatttccgtttccgtagtgaacccgctgatgctggaaaacggttggacctttgatgacagttttccgggagcaaccggagacacgctctatcaaaatgaatttctgtatcagctttatctccacgccgatccacactacagcggacgagttactgttcccgtgctgtgggacaaaaagaaccacaccatcgtcagcaacgaaagtgcagaaatcatccgcatgttcaataccgcgtttgatgcgctgggcgcgaaagcgggtgattactaccctccagccctgcaaacaaaaattgacgaacttaacggctggatttatgacaccgttaacaacggcgtgtataaagctggttttgccaccagccaggaagcttacgacgaggcggtggcgaaagtgtttgaaagcctggcacgactggagcagattttaggccagcatcgttacctgaccggcaaccagctaaccgaagccgatattcgcctgtggactacgctggtgcgttttgatccggtgtatgtgacccacttcaagtgtgataagcaccgcatcagcgattacctgaatctgtacggttttctgcgcgatatctaccagatgccggggatcgccgaaacagtcaatttcgatcatatccgtaatcattacttccgcagccataagaccatcaaccctacggggattattagtattggtccgtggcaggatctcgatgaaccgcatggacgagatgttcgcttcggttaaaaaaaggcaccttacgaggtgcctctgataattagctaagtgcatgttgttcatgtcggatgtggcatgaacgccttatctgacatacaaaacattgtacattcaatagattgcataacccgcgcagaccagataagcgtagcgcatctggcgattttgcgcttgtcatcagtcttagcgcgccttcacggcactttattaattccttgaacgaatatttactgccatttcattcacgtctattcttaatttgctgctttaaaaacaagtgattgagcaaaattgaggcaaaaatggactggtatctgaaagtactaaaaaattatgtcggtttccggggtcgtgcgcggcgcaaagagtactggatgtttattctggtcaacatcatctttacgttcgtgctggggctgctggataaaatgttaggctggcaacgcgctggtggcgaaggcatcctgacgacaatctacggtattctggtgtttttaccgtggtgggcggttcagttccgccgcctgcacgacaccgaccgcagcgcgtggtgggcactgctattcttaatcccgtttatcggctggcttattatcatcgtctttaactgccaggcgggtacgccaggcgaaaaccgctttggaccagatccaaaactggaaccttaaaacaaatctgctcgccggatgtctgactcatccggcttttatcattatgttgatgaatgaataatttactaatgtttatttaaaatatttcaatgtcgttatataaattacctataaaaaataaccatgtatttatcttaaatatcaaaacctttataacatccgaaaaagaaagatacgaatagcatttacacaatacccggaatagactttcgtcacttttaattaaagggatgtttttatgcagtggtatttgtccgtattaaaaaattatgttggtttctctggtcgcgcacgtcgtaaagagtactggatgtttactctgattaacgccatcgtcggcgctattatcaatgtcattcaattgattttaggtctggagcttccatatctgtctatgctttatttgctggcaaccttccttcccgtccttgcgcttgctatccgtcgcttacacgataccgaccgtagtggtgcctgggccttgctcttttttgttccgtttattggctggctcgtgcttctggtttttttctgcacagaaggtacttctggcagcaatcgttacggaaacgatccgaagtttggtagtaattaatcttagaattggggcgatatttcgcccctttttattaacaataataaatattattttccgttaaaaagtttgggaatttcccgcagacaccaggatttcgcttcccccatactgtcacgacgccaggccataataatatcgatctcgctggtgctttccgggctgacgacacgcaaccgcccttccgcaatatctttttcgaccataggatacggcatcgtcgccacgccaagccccgccagtaatgcctgacgtttatcttcaatcgtgctcaccgttaagcgcggctgtttgtccagcagctgtacggtcaacaccgggcgctcacgagcggtatccgccaccgcaattccacgatatttcacacgcgtcacttcagataacggttccggctcctgatgaatcgggtgatcaggcgcggcaacgtagacgttcattaacgtatagagcttgcggctgttgatctcgctgctggaacgaaaatgcatatccggcgcgataacaatatccgcccgcccctgctccagccgttcccacgcccccgccagcacttctgtgatgattgccagttgggtattggcttttgccgccagtttgtcgattaacgggaaaaaggcaggtgtcggtaccagcgcttcggtcacaatggtgagatgcgtttcccaaccgcgcgcgagagcttccgcatcagtagtcagtttatctgcggcttccagcaaaacgcgccctcgctccaacaacatcctcccgacattggtgaatttggtacgatggccgctgcggtcaaacagcaccacatccagctcttcttccagtttttgcatggtgtagctaagtgcggaaggcacgcgtcccagctcatccgccgccgccgcaaaactgccccggcgatcgatcgcatccataacccgtagtgcttccagcgttaatgccctttctttggccatttcgttctcattcaggaaatttgaacataccgggcagaatatctggctaacaatgtagcgtccagccccttaccataaaaggaagtaaagagaggtcaagaattatgattactacccgaactgccaggcagtgtggacaagcagactacggatggttgcaggcccggtatactttttcctttggacactacttcgacccgaaattgttaggctatgcctccctgcgtgtgcttaaccaggaagtgctggccccaggtgccgcctttcagccgcgaacctatcccaaagtcgatattttaaatgtgattctggatggagaagcagagtatcgcgatagcgaaggcaatcatgttcaggccagcgccggagaggcgttgctgctctctacccagccgggtgtcagctatagcgaacacaatctcagcaaagacaaaccgttaacgcgaatgcagctttggctggacgcctgcccgcagcgagagaatccgctgattcaaaagctggcgcttaatatgggcaagcagcaattaatcgccagcccagagggtgcgatgggaagcctgcaattacgccagcaagtgtggctgcaccatatcgtgctcgacaaaggcgaaagtgcgaatttccagttgcatgggccacgcgcgtatttgcaaagcattcacgggaaatttcatgcgcttacgcatcatgaagagaaagcggcgctgacctgcggtgatggggcgtttattcgtgacgaggctaacattacgctggttgccgattccccactgcgcgctttgctgatagatttgcctgtctaattgtttttacagggagatgatgatgagtaaaaaattggccaaaaagcgccagccggtgaagcccgtggtggcgaaagaacctgctcgcaccgccaaaaattttggctatgaagagatgttgagcgagctggaagctatcgtcgcggatgctgaaacgcgtttagccgaggatgaagctaccgcgtaaagacaggttgccggatgcggcgaaaacgccttatccggcctacaaaatccaacaacattaacgaattaaacaacccgtaggccggacaagatgcgccagcatcgcatccggcacgatccccaaaacctggcgtttatctggccttgctcgccataatctcgataatctgccgatccgtttgctgcatgctatggcttgctaacgcacacaggttggcaatgctctgctcaacatcatgcgccacaatcccttcattgccggtcacggcggtatcatccagcgccattaacaccgctttccacgcagcgctagcactggtgctaaccttcatcgcgcagctgttgctcgcaccatcgcaaatcatgccgctgacatcgccgatcatactgctgatcgccatgctgatggtttcataacgcccatccaccagccatgccatcccggcggcggcccccattgctgcggtcgttgcggcacacagcgcagacaaacgcggtaactggttatggatgtaaattgcgctcaaatggctaagcatcagcgcacgcgccagccgttcatcatccgctccgaagtgttctgctaccaccaccacaggcattgttgcggtaatcccctggttaccgctgccggagttactcatagccggaagcgtagcgccgcccatacgcgcatcggatgccgcgctggtacgaatcacaatggaactagagagatctttcgccagcaaaccgcgctcgcactgtttttccagcgtcgcgccaatatgcagcccccacttaccgctcaaaccttcctggcttaacgcacaatttagcttcgcggaatcgagaataaagcggatcgccgcaaacgggacttcattgacgaacttcaggatctcagccagcgtcgttctggaaagcaccgtcagcggagactcttgctcgccctctgccacacacgcctgctgggtaaacaccacaccatcgtgcgtctcgatatgcacaatgttggtatgcccgccgacgatggtgacacacgcccacttctcaccgttccagactttggcgcgactgaagaggatttcatcgcaaggttcctggatcttaacggagactttccccgccgccagcagtgctttggcatcggcaattgcctgcgctgttgcgtctttcagcacttccagcccggcgttggcatttccacctaacgcccccagcgccgccgcaatcggcagccccaccattcccgtgccgggaacggtgacgcccagaccgttcttcatcagatttgggctaacccaggcttctacacgttcaaccggaccttccagttctgccgcagcaaccgccgccgccagcgccagactaatcggttcagtacatcccagcgccggttttacttcctcctgaacggcgaggatgtaacgctgccataacggatttaaagtgctatcaaacatattaaaaaccttaaaatttcaggtaaatcaagaaaatgccaggaacggagaaacacacagcaacaaaccagtgacgataatcaggtacagagacatccctttgtatttgtgcaatgctggtactttgtaaaccagccacgccgggatcaggcaccctaccatgccgaaaatcgggctacagatagaggtgaagctcaacaccggtgcgttcagtacgatggcgctccaggccagcaaaatggcgaaaatcatgatgccgcgctgaacgagattttcgttaatcttctcggcaggcatcttgcgacgcaggatgttcattacgatcccttgcgttgcttcgcgaaagcctaaatagacgccaaagaatgcagtcatgacagcaaagatattgagaatgacgctgaccactttcacccacgctgcgccgtcaccgctaataaactgtgcggcaatcgccagcgcggaaatattctgctcataggcttttaccgcttcgtcatgtcccatcgccagcgtgaagctcacggcgtagaaaaagacggtgacaaacaaaatgccaaacgcgatattcattgcccgcaatgctttatgccgcgccacttcaatacttttttcccggctgcgataagagatcaccatcggacttaacgtctggataaacagaatgctcgtcagggtaaacggcagcgtaataatggcgtttttcaccagcagccccagcggcggtaggctaccgacgttatacagatgccacattcccaccatgctcacgcccagcgccgcgaccaccagcagcttggtcagcaccatgccggtgctaattttgaataacaatttctcgccgcgactggagatcgccaccagaatgcaaatcagtaccagaccataaaagggactgtcactcagcaacccttccgtcacgccgaaggtatgcaggtaggaagcactatcgttggtgatggcggtggaatagacgaacatccaaatcaccagcattacgaaatagagcgcacctaacaggatgccccagtttttacctaaataaccgctaatgacgctcgggtaatctttacattctggactttctgccagcgtattaataaacaatcgctgaaacagatacattgccgggtaaccaatcacgctactgagcaaaaatacccacaatcccatcaaaccgacctgcaccgggagaaaaacaatccccgcgccaatcgccatcccgatactcataatcacccagccggtgtcagtactgtcgaatttgatcgcttctcgccactcgctctcactcattccagcacgacccgccggggtcgaagcgtctgcaatgacgcctttattcgatgcaatttccataatttctcgctcaatattttgtagggcttattatttttttccgagccgcatcaaggcgatatgcggtctacgtttttgcaggcgagttattagaataaagaaatgatacgcgcgaggtcagagaaaatcttcacaatcaagactttgaaataacggagatggataagaattttctactaaattaatcgcaggagaatattcattctctatttgcggcagatcacaaaaaaaaggtgcacatttgtgcacccaaggatgaaagctgacagcaatgtcagccgcagaccactttaatggccagtcctccgcgacttgtttcgcggtatttatcgttcatatctttgccggtttcatacatcgtctcgatcactttatcgagactaacacgcggtgcgctggtgcggcgcatcgccatccgcgcggcgtttactgctttcacggcattaatggcattacgttcaatgcacgggatttgtacctgtccggcaaccggatcgcaggtcagcccaaggttatgctccatcgcgatttccgccgcattgcatacctgcgccggactgccgcccagtagttcagttaaccctgccgccgccatactacaggccacgccaatctccccctgacagccgacttccgcgccagagatggaggcgttcattttatacagcgcgccaatagcccccgcggccagaaaatagcgggcaatactccgctcgtttaccggacgacggaacttatcgtaataagccagtactgccggaataatgccgcacgcaccgttagtcggtgccgttaccacgcgcccgccagctgcgttttcttcactaaccgccagcgcgtacatgttgatccagtcgatgacattcatcggatcgttagagatgttatcgctggaaaccagctgacgacgcagcgctacggcacggcgcggcacattgagcggaccaggcagcacgccttcagtgttcatcccacgttcaataccgtcatgcatcacttgccagatacgggcaaaaccggcgtcaatttccgctttgctgcgcagcgctagctcgttgtgcatcatcagaccagatatagacaggccgttgtaatcacacattttcagcagttcacctgcactgtggaaatcgtaaggtacggacgtttcgacatcgtggctcaggccgaagtgttcttcttcgacaataaacccgccgccgacagagtaataggttttacttaatagctcttcctgtcccttccaggcagtgatccgcattccgttctcatggcgaggcaacatttcgggatggaagataatgttctttgctacaggaaaatcaacaatatgcgcaccagatgccactggcagccgcccgctgcgcgttactaactctataaatgcagggatctcatcaatgacaacatcctgcggactgtttcctgccagtcccatgatgatggcgacatccgtggcatggcctttgcccgtcagactcaagctcccgtacagatcgaccacaatatggctcgtcgcggttaataagccgctactttccagccgatcaataaaactttttccggcattcattggccccacggtatggctactggagggaccaatcccaattttgaaaatatcgaatgcactaatcatatccacaccctcggattgccgttcagtgaagtggagcggaacgaccttacgaccgtcccgctcacgaggctttacgcactacgtactgcgatggcttcaatttccagcttcacatctttcggcaaacgcgcgacctgcacacagctccgggtcggataggtcgcctgatgctcatcgaagaactgcttatagacttcgttgatggtggcaaaatcattcagatcggtgataaacacggtcatcttgatgatatcgcccacgctcagcccggcagcaaccacgatcgctttgacgttttcgaggcttaaacgcgcctgatcttgcacatcagccgggatctcaccggtctgtgggcaaaccggtatttgcccggaggtgaagaccatgctgcctaaatcaacgccctgaacataagggccgattgcgcctggggcacgttgcgtttcgataatctttttcatacatcctccggcgtcagagcgcctgggtaaaggtacgactaataacatcctgttgctgttcacgggtcagtgcgttgaagcgcacggcgtagccagagacacggattgtcaggttaggatatttttccgggtgctcgatggcatccagcagcatttcccgattcattacgttgacgttgaggtgttgaccgccttcgacatccgcttcgtggtggaaatacccatccagcaggccgacaaggttggttttacgtactggatcttctttgcccagcgccgcaggaacgatactgaaggtgtagctgatcccatctttggcgtaggtgaacggcagtttcgccacgctcgtcaaactggccacggcacctttgcggtcacgaccatgcatcgggttagcgcccggcgcgaacggtgttccggcgcgacgaccgtccggcgtattaccggttttctggccgtacaccacgttagaagtgatagtcagaatgctctgggtagggacggcgttgcgataggttggcagcgctttaattttcttcataaagcgttcaaccaggtcgcaggcaatgctgtctacgcgctcgtcgttgttgccgtactgcggatattcaccgtcgatttcaaagtccaccgccaggccgttttcgtcacggattggtttcacgcgggcatatttgatggcagacagggagtccgtcgccacgctcaggcccgcgatgccgcatgccatagtgcgatagacatcacgatcgtgcagcgccatcaggctagcttcgtagctgtacttgtcgtgcatgtagtgaatgatattcagcgcgctgatgtactgcaccgccagccagtccatgaagtgatcgaggctgtccatcactttgtcgtaatccagcacgtcgtccatcagcggtgctgttttcggcccgacctgaatcttcagcttctcgtccaccccgccgttaattgcgtagagcagcgttttcgccaggttagcgcgtgcaccaaagaactgcatttgcttaccaatcaccattgggctgacgcagcaggcaatcgcgtaatcgtcgctgttgaagtcagtacgcatcagatcgtcattttcatactgcaaggaagaggtgacgatgctcacctgcgcggcatattttttgaaggcaatcggtaattcttcgctccaaagaatggtcaggttaggttccggtgccggccccatagtgtgcagggtgtgcaaatagcggaaggagtttttggtcaccagcgtacgaccgtccagccccatcccgccgatcacttccgtcgcccagattgggtcgccggagaacaggctatcaaattccggtgtacgcaggaagcgtaccatacggatcttcatgatgaagtgatcgatcagttcctgtgcctgctgctcattgagtacgccagctttaaagtcgcgctcaatgtagatatcgaggaagcttgccgtgcggcccaggctcatcgcgccgccattttggcttttcactgccgccagataagcgaagtagagccactgcaccgcttcctgcgcattctgcgccgggcgagagatatcaaagccatatttcgccgccatttcctgaatctgcaacagcgcatgacgatgctctgccagctcctcacgcagacggatggtggcttccagatcctcgcctttttccagacgagactggagatcggcaaattgcagttcgcgttcacgtaccagataactgatgccatacagcgctacgcggcgatagtcaccgataatgcgcccacggccatagccatctggtaaaccggtcagcacgccagatttacggcagcgcagcatatccggactgtaaacatcaaatacgccctggttatgggttttacgcagatcggtaaacagatattcaaattcactgtccatttctcggccataggcgtggaaactacttttaatcatattaatgccaccgaacgggtgtagcgcacgtttcaacggcgcatccgtttgcaggccaacaattttttccagcggctggttaatatatcccgcatcatgagcggtaattgtggtggcaatattggtatcgaaatcaaccggcgcgtgggttgcattttcgatacggatgccttccattactttttcccacaattccgtggtggcaggcgtcgcttcggcgaggaaagattcatcgccttcatacggtgtatagttatgttgaataaaatcgcggacattaatttcgtttttccagtccgtacctttaaagccaagccatgcgtcggcgtacagcttatcgctggtatcaatatctaccttcatgaaaaataatctctctacaatacttcaactaaattatgcaaattctgcgggcgcgttaactttgcctaaatgaatggcatccaaagcaatcattttttcttcgttagtcggaataacggcacaaatgacacgcgcattttcactggaaacaattcgctcaccacaggagttagagcgattattcatttctgtatcaatctctaagcctaatacagccaaatgttccatgaccagacgacgaattaagctactattctctcctattccgccggtgaatataattccatccaggcgacgtaaactagctgcgtgtccggcaatatgacgggcaattcggtgaacaaaggttttaattgccagttgcgcgcgttcgtgaccttcatgccaggctttttccagaacacgtaaatcgctagaaagaccggaaatacctaataatccgctctctttattcactacgcgttccaggtcacccaggctctggttggtttggctggcgacccaggacatcgcaccaaagtcgacatcgccactgcgggtacccatcatcaagccttccagcggcgtcattcccatactggtatcaacactctgaccgttgcgaaccgcgcagatactcgcgccattgccaagatgcgccacaaccaggccggagtcatcttccgccagattcagcaggctatgtgcgcgctgggaaacatagcggtggctcgtgccgtggaaaccataacggcgtacacctaactcttcataatatttccacggcaggccgtataaataagcttccggagccatcgtctggtggaaactggtatcaaataccgccacctgagttacgcccggaaataattgctgcgcgctttcaataccacttaaattggcgtaattatgcaggggtgccagtggagaaacgcgacggatattatcaatgacttcatcggtaataatggcggactcggtaaaaatactgccgccgtgagcgatgcggtggccaattaaggccacactgtcatttaaattccgtttttccagttcaaatgcaattgccttcaatgcaccttcgtagctgtggtgagccagcggtgctggctctcccccatttacggataagaatgcattttcgctgttaataccgtcggcaataccactcattaatacttcacagtcgctggcatcgagcacggaaaacttaatgctagagctaccacagttaataaccaaaacaaccggaaattcattcatctcttttctcatcctgagttacggattaaaacagtttgtatacgatgttcaggatggtcagcagaccaatcacggtaacaaacacgttatccagacgaccacggtatttcgccagagacggcgctttacggatggcatacatcggcaacaggcacagcagggatgcgataatcggtgcgcccatggcttcaatcaggtcaaggatgttcgggttggcgtaggcaacaacccaggtggagcccatgatgaagatcatgctgatagtgttcagtttacccaggctcactttagttttgtcgcctttataaccaaacttcaggaccaggccattcagaccttccagcgttcccagatagtgaccgaagaaagatttgaagatagccacgagtgcgatgatggaagccgcatattccagtgtaatcgcgaacgttgttttggtaccggtcatggacgcaaagtggttagccagataagaaagcactggaatattctgcgctttggcttccgccatgttggccggagacagagtaaacaggcagctaaaggcaaagaacatcaccactgcaaccatcagcatgctggcacgagaaatgatttgggaacatttacgttcggtgaagtcgcgaccgaagtctttctcatactcttcacgcttagaaaccacgaaggaagagacgattgggctgaagttaaaggagaaaaccatgatggaaatccccagccagacagtgatcaggataccgtcatgaccggttaagctcaggctaccgaggtcaacctggtcgataactgcagagttccagtaagggatcaggctcaaagaaatcagcaccaggctggcgataaacggccataccaggtagctcatcactttaaccatcagatccttaccaaaccagatgacgaaagccatcagcagcaacaggaacagcgccacaaagccgcgattcagcggtgcaaagccgagctggttttcccagaacgtcataaaggtattggtaatagtaacgccataaatccacagcagtgggcaaatcgcgaagaagtacaggaacgtgataaccacgccgccagttttaccaaaatgctcttccaccgtttccgtaatgttgccggaagggttagagccagaaagacacagacgcgccagcgcccggtggcaataaaacgcgatggggtatgccaataccaacatcagaagaatcgggatcagtccgccaaaacctgcgcggatagggaagaacagcaccccggcgccgattgccgtaccaaacaagcctaacgtccatgtggtatcacttttacgccaggagctttgttttgtctggctggatacaatgctatcactagtactcatatcctatcctcaacgaattaattaagcgtcaacgaaaccggtgatttgagagacgcgagaaagatcgatattgccgccggaaataatactgacggtttttctgttttgaatatattggtctaatttaccgcttaataatgcagcacatgccagagcgcctgcgccttcggtgacgactttattgcgctgaattaaggcaatcatactgtttctgatttcgtcttcgctgaccagcacgatgtcatcgactaattcacgaacgatttcgtaagttaaattacccgggcgggagacatcacaaccatccgccagggtgccggtagttcggtgcgtggttatttctccggagtggaaagaagccgccatgccgtgaacgttttcagactgtacgccaataacacgaatggtcgggttaatagatttaattgccaccgcaataccagcaattaaaccgccaccaccaattggcacaatcacgttatcgacatcatagagatcttccataatttccagaccaatcgttccctggccagcaatcactttcggatcatcgtaaggtgggataaaaatacggccttccatttcgacaatttcgctcactttagcgatagtgtcgttgaagttatcaccatgcagaacgacttctgcggagtagtcgcacgttgccgctactttggattttggcgcaccttttggcatcaccactttaccgtcgatacccagcatcgcgcaggagagggaaaccccttgcgcatggttgcccgcagaacaggccaccacgcctttgcgtttttccgcatcggtcagactacttaatttattaaatgcgccacgaattttaaaactacccgtacgctgcatattttcaaacttcaggaatatttcacctttgcaacgttcactaaaatagttggagcgaggcatgcctgttttataaattcgcccagccagtcgttgtttcgcttcaataatgtcatcaatagcaaccggcagatcgtatgtaatatgcattataaaacctcttcgcctgaattaaatatgtaggtaaccgtaaccgacacctgcaagacagacaggtggattatttatgtttaaataaaaacaaataattaaccaacttctattaattgccttcgtctacacccattataagaactatactctttggctaattccaccaaaacgcttgctgcttttttaatacgataatttttgctccataccgcggcatattgtgccacaggtaatgtttcttcaaccggaatagtaataaattgattagaaccaaaaggactcgtcatatcacaaggaattacagttaagaaatcagcattgagaacaagattataaattgtcacgacactgtcggttttaacgatgttttcaatactgatgccatttctttgtaacgtagtaagcagttcgctgtagtaccccatattagtttgtggcaacacccactgttcgttcttcaagctctccagcgtggtggtgccggtgcatgttcgggacttactggctaccagcacaaactcggactcgaacagcggctcaacatgtaaatcctgaagcttcatttctgcacttaacgtaccaatcgcaaaatccagtcgaccgtcgcggattgccggtaagaagctagacagttgcgcttcatacatagaaacctgcgctttcgggaacacctctttgaacttgttgatcatcccactcataaaagtaaaaccaatcaaactaggaaaaccaaaactgacttccaccaccgcctcagaagacataccgcttatctcattaaccatatttttcatttcacgggtaatggattcggaacgggagagtaacaattgaccggcaggtgttaatgttacaccggtatttttccgcaccactaattccacaccaaaataatcttcaatatcgttaatgattttactgacggccggttgagttaaccctaattcttttgcagcgctgccgatagaaccacttctaatgacttcctgaaagactaccaggtgctgcgttttcggaagaagaatagtgctcataacgacctacgttaattacctcattgacggcatgaagtgtatcaaaatgaaatgaacaggatatgtgcgaccactcacaaattaactttcaatactttccagagtatcgttattacaattaaatacctttaaatatcaacaagttaaagtataaaaatcagcataaaccctgatttttgtcaaaaaaaatgacggggataaccatattttatggcgataacatcattcgttatgtggttaatacaaaaaaggggctgagaccatatttcaagcaattaccggataattaccaggcaaaatttgagttaaatttaatgagcaagttcagtaattttattataaataaaccatttagtgtgataaataatgcggcatgtcacatttttagtcgctatttgttggagaacaaacatttattttatcaatattttaaaattagcaatacatgtattgatcatctcgaacaattgattaacgtcaactttttctcttctgacaggacgagtttttgtgaatgcaatcgttttccataaattcttctcccctcataggcgacgaatagcattttgtgttgaggatcacaaaacgaataattgctgatcgccgcgataaggtcagacaaagacaacaagggaaattttcacagagcttttgatcggcgtaggccacagaatgttgcttcgtttactgtaacgccgggtaaatgagcgttttttgatagtgcgaaagaaccctgcgaggaaaataagcatctattattgtttgtcatgatgacaaggcaggcatcaatgaaaggcttcccaattgcgcatatttttcaccctagtatcccgccaatgcacgcagtggttaacaatcacaatagaaatattgattattggacggtaaaaagaaagtttgcagaaattgtctccaccaatgacgttaataaaatttacagtataagtaatgaactgcggagagtattatctgcaataactgcattgaatttctatcatggcgatgttccttctgtcatgatccgaatccaaccggaaaatatgagtccattcattatagatatttctacaggagaacatgatgattatatcatacaaacattagatgtaggcacttttgcaccttttggtgaacaatgtacttgcagtgccgtcaataaaaaagagctggaatgtattaaggagacgatttctaagtattgtgcaaaattcacccgaaaagaagccatcttaaccccccttgtgcactttaataaaaccagcattactagtgattgttggcaaattctcttttttagtcccgatcattttaataatgatttttattgattatttataaaggataaaataatgttccctgttagtagtattggtaatgatattagtagtgatttagtccgtcgaaaaatgaatgaccttcctgaaagcccaacaggaaataacctcgaagcactagcaccaggtatagaaaaactaaaacagacctctattgaaatggtcactttacttaacacgttacaacctggtggaaaatgcattatcactggtgattttcaaaaagaattagcgtacttacaaaatgtaattctttataatgtcagctctcttcgtctggattttttaggttataacgcccaaattattcaacgaagcgacaatacttgtgaacttaccattaatgaaccgttaaaaaaccaggaaatatccacaggtaatatcaatattaattgcccattaaaagatatttacaatgaaatcaggaggttaaacgtaatttttagttgtgggactggagatatcgttgatctatcctctctggacttacgtaatgtcgatttagattattatgatttcacagataaacatatggctaatactattttaaatccttttaaattgaatagtacaaattttactaatgccaacatgtttcaggttaattttgttagtagtacacaaaacgccacaatctcctgggattatttactaaaaataacgcctgttttaataagcattagcgatatgtattctgaagaaaaaatcaagtttgtcgaaagttgtttaaatgagcctggagacattaccgaagaacaattaaaaattatgagatttgcaattataaaatctataccaagggcaactcttacagataaattagaaaatgaattaacaaaagaaatatataaaagcagtagcaaaatcatcaattgcttgaacagaattaaattaacagagatgaaagaattcagtagtgaaaaaatatatgattacatcgatataatcattgaagattatgaaaataccaaagaaaatgcttatctggtcgtcccccaaattaattatactatggatttaaacatagaagactctagcagtgaagagttacttagtgataataccctcgagaaagacgaaaattctccggacaatggctttgaggtcggggaatataacacatatgaagcatataacagtgagaagcaatattttaccagagaggactatacgtatgattacgaccttttaaatgcaatataaacttaataacttcttacaaagtctattattaataccgtagatatttattcatcttaccctgtgcaccaaaagcaaaaactcactgacgcgggtttgaaactgatggcaaccgcaaaaatgcctgatgcgctacgcttatcaggcctacgccatctctgcaatatattgaatttgcgtgcttttgtaggcaggataaggcgttcacgccgcatccggcatgaataaagcgcactcaacaatctgaaacccgccggaacggtttattacgtacatcaggtaaaactgaccgataagccgctttcttttgggtatagtgtcgtggacagtcattcatctttctgcccctccaaaagtaaaaacccgccgaagcgggtttttacgtaaaacaggtgaaactgaccgataagccgctttcttttgggtatagtgtcgtggacagtcattcatctttctgcccctccaaaagcaaaaacccgccgaagcgggtttttacgtaaaccaggtgaaactgaccgataagccgctttcttttgggtatagcgtcgtggacagtcattcatctttctgcccctccaaaagcaaaaacccgccgaagcgggtttttacgtaaatcaggtgaaactgaccgataagccgggttctgtcgtggacagtcattcatctaggccagcaatcgctcactggctcaagcagcctacccgggttcagtacgggccgtaccttatgaacccctatttggccttgctccgggtggagtttaccgtgccacggactgttaccagccgcgcggtgcgctcttaccgcaccctttcacccttacctgatcccgcttgcgcgggccatcggcggtttgctctctgttgcactggtcgtgggtttcccccccaggcgttacctggcaccctgccctatggagcccggactttcctcccctccgcccgtctcccccgaagaggacgacgacgaagcggcgactgtctggtcagcttcggcgcgcagtatagagggtttgcgcgcccttgtcaccccgcgttgcgcattccaatcgccagtgtcgcggcgatattacgactagcacggcagatattgtcataagccccgcggaatgcttcgtccaacgtacctatgctggtcaatacgctgaagaccgcatcaatgccatgctgatgtacaacgccaacatcatcggtcaggctacccgcaatgccaatcaccggtttatggtacttcttcgccacgtttgcgacaccaatcggtaccttcccgtgaatactctggctgtcaatacgcccttcaccggtgatcaccagcgtacaatcgtgaatatgttcctccagattcagcgccgtagtgacgatttcaataccacttttcagttccgcaccaagaaacgccattagcgccgcgcccataccacccgcagctcctgcaccggggacatctttcacatcaacatgcagcgcttttttaatgacctcggcatagtgagagaggttattgtccagctcaacaatcatcgcttcactggctcccttttgtgggccaaagatgcggcttgcgccgttatcgcccaccagcggattggtgacatcacaagcgacgcgaatgacgcaatcttttaagcgcggatcgaggccggaaatatcaatatcattcagagtattaagactaccgccgccaaaaccaatttcattgccgttggcgtcgcataatttcgcccccagcgcctgtaccatgcctgcgccgccatcatttgtagcgctgccgccaatgccgataataatgtttgtcgcaccgctctccagcgcctgcaggattaactcgcctgtgccgcgactagtggtcacgagtggatcgcgtttttccgcaggtaccagctccagcccactggccgccgccatttcaataaacgcggttttgccatcgccggagatcccccaactggcattcactttctcgcccagcggccctgtaacccaggcgtgacgttcagccccctgggtggctgcaatcatcgcttccaccgttccttcgccaccgtcggcaaccggaacagaaacgtactgtgcatcaggaaaaatttcccgaaatcctttttctatcgcctgcgcaacctcgctggcagataaactttctttataagagtctggggcgattacgattttcatacctatgcctgttaccacatgacgccggagggcgtttctcttattcggcctggattccaggcccggattgcaatacgccatccgggcacgacgtcattaacgagtaacttcgactttcgccagtttttcgtagtagcacgccagggcgctatgatccgccgttcctaaaccatctgctcgcagtgcctgcatcatctccataaccgcagctgtgagcggcagttgtgcgccgacgccgtgagaagtatccagcgcattcgccagatccttaatatgcagatcaatacggaagcccggcttgaagttgcggtccatcaccatcggcgctttggcatccagcacggtactgcccgccagtccaccgcgaattgcctgataaaccaggtccgggttaacgcccgctttagttgccagcgttaacgcttcactcatcgcggcaatattcagcgccacaatgacctgatttgccagtttggtgacgttacctgcaccgatttccccggtatgcaccacggaacccgccatcgctttcatcaaatcatagtatttgtcgaaaatagccttgtcgccgcccaccatcacactcagcgtaccgtcgatggctttcggttcaccgccgctcaccggagcatccagcatatcaatgcctttcgctttcagcgcttcgctgatttcacggcttgccagcggtgcgatagaactcatatcgatcaataccgtacctggcttcgcgccttcaataatgccattctcacccagcgccacctctttcacatgaggggagtttggcagcatggttatgatgacgtcgcactgttcagcgatcgctttagccgtagacgctgtttctgcacctgcagcaatcacgtcagcaatagcttctgggttacggtcagcaaccaccaggctgtaacctgctttcagaaggtttttactcattggtttacccataatccccaggccaataaaaccaactttcatagtcatatcaatcatctctcttgttgcggtggtggttattttttaaaggtatcagccagtttctgagtggcagagcggaagacgccgagatcgctgccgacagccacaaacgtcgcgccccattccagataacgacgcgcatcggcttcgaccggcgcgaggataccgctgggtttgccgtgcgcgctggcacggttaaaaatgtgctgaattgctttttgtacatccgggtgacttgcattgccgagatggcctaatgccgcggccagatcgctggggccgacgaagatgccgtctacgccttcggtagcggcaatggcatcgacgttatctacgccctgctgactttctatctggaccagaatagtgatgttcttgttgctctgagcgaaataatccgccacggtgccaaacatattggcgcggtgagaaacggagacgccgcgaatgccttccggtgggtaacgggtacttgccaccgccagctctgcttcctcttttgtttctacaaaaggaatcaggaagttatagaaaccgatatccagaagacgcttaataattaccggctcgttggtcggcactcgcactactggcgcgctggcgctgcctttcaaggccattaactgcggaataaacgtggagatatcgtttggcgcatgttcgccatccagcaccagccagtcaaacccagccaaaccaagaacttcagtgctaatcgggttagagagtgcactccagcaaccaatttgtacctgtttcgcagccagtgcggctttgaatttattcgggaaaacatcgttattcatcgcttatacctttgcttatttctgcaattccatacgtttaatgtcgccaactacgaagaggtagcagaccatcgccatcagcgcactacatcccacgaaaaccagtgctgcattgaaggagtgcagttcacttaccaggtagccaatcaccagtggagtgacaatggaggcaacattgccaaagacgttaaagacgccgccgcagaggccaacaatctctttcggcgcggtgtcagaaatcaccggccagcccagcgcaccaaatcctttgccaaagaaagccagcgccatcagcatgaccaccagcgtggtgttgttggtgtagttacataagatgatggtggaagccagcaacattcccagcacaatcggtagcttacgtgccagggtcagggataaaccgcgtttgatcagataatcgctgaagacacctcccagcacgccgcccgcaaaaccacacagtgctggaatgctggcgaccagacccactttcagaatgctcatgcctttttcctgcaccagataaatcgggaaccaggtgaggaagaaccaggtgatggtgttgataaaatattgtccgaaaaatacgcccagcatcatgcggttagagagcaattgcttgatgtaatgcagtttgggtccgcttgctgccgcactgcccggctttttgtggtccatatcgaccaccgcgccattttcagagataaacttcagctcttccgcagacatacgtgggtgatctgtcgggttatgaatcaacttgatccacagcgccgtcagcacaaaaccaatcacccccataacggtaaagacgtgctcccagccccaggcgaaagtcagccagccaagcagcgggctaaagagcgccaggctgaaatattgcgcgctgttaaagatggcggaggcagtaccacgttctttcgtcgggaaccaggcggcgacaattcgggcgttcgccgggaaacttggcgcttcgctgaagccgagcataaagcgcataaagaacatggagatccctgcccaggccagcgggaacatatcaacaaagccttgcaggaaggtgaataggctccagaaaaagaggctgtaggtgtaaacttttttgctgccaaacttatcaagcagccagccgccggggatttgcatcagcaagtaggcccagccaaaagcggagaagatgtaacccatgctaaccgcacttaactgcaactcttttgccacttcggtaccagcaatagacagcgttgcacgatcggcgtagttaacggcggtaacaataaaaataatcagtaatattaaatagcgggtatgcacgcctttctttttttcgtcaacggtgtccagaatcattttatttacctcgggtacttatgctgatttttattattatggggaaggtgttatttatgagtttcatttatgccgtaacgacaatgaactcgggaattagtataagcagcgcgagaataataatcattgtgcaaatgctaatttaattaatactatttaaatattattttgagcatatgcacataaggttgcgcgctaaagcacagatttgcgctttaccttaccgggcggcactgcaatccctgaaatgattgacattgatcacatttctgcgtttaaactcctgacattcttatttcacccaatgaagtcatttatttttaaatgagaccaggtcctcattttaataacccctggctggagaatattgcacaatggccaacatcgaaatcagacaagaaacgccaactgcgttttatataaaagttcacgacacagataatgtggcaattattgttaatgataatggcctgaaagcaggaacgcgttttccggatgggctggaattaattgaacatattccccaggggcataaagtcgcattgctggacattccggctaatggtgaaattattcgttatggcgaagtgattggttacgccgtgcgtgcaatcccacgcggaagctggatcgacgaaagcatggttgtactaccggaagcgccgccgttacacacgctgccactggcaaccaaagtcccggaacccttaccgccgctggaaggatacacctttgagggctatcgcaatgccgatggcagcgtgggcaccaaaaacctgctcggtatcaccaccagcgtccactgtgtggcaggcgtggtggactatgtagtaaaaatcattgaacgcgatctgctaccgaaatacccgaacgtcgatggcgtggtggggctgaatcatttgtacggttgtggcgtggcgattaacgcaccggcggcagttgtacctatccgtaccattcacaatattagcctgaatcctaactttggcggcgaagtaatggtgattggcctgggttgtgaaaagttgcagcctgagcgcctgctgactggaacggatgatgtgcaagctattccagtagaaagcgccagcattgtcagtttgcaggatgaaaagcatgtcggttttcagtccatggtcgaggatattttgcagatcgccgaacgccatctacaaaaactgaatcaacggcagcgagaaacctgcccggctagtgaactggtcgttggtatgcagtgcggtggcagcgatgcgttttctggtgtaacggcaaacccggcggttggctatgcgtctgatctactggtgcgctgcggcgcaacggtgatgtttagtgaagtaacggaagtgcgtgacgcgatccatctgctgacaccacgcgcagtgaacgaagaggtcggcaaacggctgctggaggagatggagtggtacgataactatctcaatatgggaaaaaccgaccgcagcgccaaccctagcccgggcaacaagaaaggcggtctggcaaacgtggtagagaaggcactcggctccattgctaaaagcggtaaaagcgcaattgttgaagtgctgagccccggtcaacgcccgactaaacgcggattaatttacgccgcgacgccagccagcgattttgtctgtggcacgcaacaggtggctagcggtatcacagtgcaagtgtttacgaccggtcgtggtacgccgtacggcctgatggcggtacccgtcattaaaatggcaacccgcaccgagctggcgaaccgctggtttgatttaatggatattaatgcgggcaccatcgctaccggcgaagaaactattgaagaggtgggctggaagttgttccactttattctcgacgtcgccagcgggaagaagaaaaccttcagcgatcaatgggggctgcataaccagctggcggtgtttaacccggcaccggtgacctgatttcttttggaacgtccctcgcaaaacatggccttagtgccatgtttttattgtttaaagcccccacgtccattaataatgcatttgcattaccttagttcaagcttataatttgagcagaaaacaggctgtaaaaggacagtgaatcatgcccgctaatgctcgctctcacgctgtactgaccactgaaagtaaggtcacgatacgcggacaaacaactatccccgcgccagtgcgtgaggccttaaaactgaagccaggccaggacagcattcattacgaaattctgcctggtgggcaagtatttatgtgccgactgggagatgaacaggaggatcatactatgaatgcatttttgcgttttctggatgcagatatccagaacaacccgcaaaaaactcgtccattcaacattcaacaaggaaagaaacttgtcgctggcatggacgtcaacattgatgatgagattggcgacgacgaataatggattttccacaaagggttaatggttgggcgctatatgctcatccctgttttcaggaaacctacgacgctttagttgccgaagtcgagacattaaagggaaaagatcctgaaaattatcagagaaaagccgccacaaagttattggcggtagtccataaagtgattgaggagcatatcacggtcaatccaagtagtccggcattccgtcatggcaagagcttaggctctgggaaaaataaagactggagtcgggtaaaatttggtgctggtcgttatcgtctcttctttcgttatagtgaaaaagagaaagtcatcattctgggatggatgaacgatgaaaacactctgcgcacctacggtaaaaaaacagatgcctataccgtattcagcaaaatgttaaaaagaggacatcctcctgccgactgggaaaccctcacccgagaaacagaagaaacccattgatggtgttcacaatgcccgccgaacgcattcgtgttgaccagcgggcatcctttctcactccccgaccagaatcacttcaaccccagcctttcgcagtccttccaggctatccgcaggaatgccttcatcaacaatgatcatgtcgatacgttgagtatcaatgatcttatgtaaactggaacgattgaacttactggaatcggtgaccacgatgatccgttccgcaacttcgcacatccgacggtttaaacgagcttcatcttcattatgtgtgctgacgccgcgctccagatcgatcgcatctacaccaagaaacagcatatcgaagtggtaattttgcaggctttgctcagcctgatcgccgtaaaaagattggctctgacggcgcaaatgcccgccggtcatcagcagctcaacgccttccgcttccagcaacgcattagccacgttcataccgttggtcatcgcaattacgtcagtgtgcttgcgcatcagacgagcaatctcaaaagtggtggtcccggaatcgaggataacccgatgacctggctgaatcaactcaacggcagctttcgcaacgctgcgtttcatcgcggtgttcagtgcgcttttatcttccacacttggctcgacactcggcgtcgtgctatcgcagatcaacgcgccaccataggcacgcacagcgatcccctgcttttccagaaacgccagatcgttgcggatcgtcacagtagatacgccatacaatgcgctcagatcgttaacctgcacactcccttgctgtcgcagacgctgaatgatctgttctcgtcgctcgctggtgccagtcactcgcttctcaccactagcgtcggtattactcatagtaagtcctttcgtaaaactttcgtttcatttcgttttgcctattaacgcctttctattaagcaaatgcaagcccaccttgcccattgacgcaagctactctcgtttcagtgactttcattatgtttcttttgtgaatcagatcagaaaaccattatctttcgttttatttttatctcaccatgacgcagtatcaactgaaacaaaacgaaagattaatatcgcagtaatctgaactggagaggaaagtgaaacatctgacagaaatggtgagacagcacaaagcgggcaaaacaaatggaatttatgccgtttgttccgcacatccgctggtgctggaagctgcaatccgctacgccagtgcaaaccaaacgccgttactgattgaagcaacctccaatcaggtagaccagttcggcggttataccggaatgacgcccgccgattttcgcggctttgtttgtcagctcgccgacagcttgaatttcccgcaggatgcgttgattctgggtggtgaccatctggggccaaaccgctggcaaaacctgccggccgctcaggcaatggccaatgccgatgatttgattaaaagctacgttgcggcaggattcaaaaaaatccaccttgattgcagcatgtcctgtcaggacgatccgattcccttaactgatgacatcgtggctgaacgcgccgcccgtctggcgaaagtggcggaagaaacctgtcttgaacactttggcgaagccgatctggagtatgtcattggtaccgaagtgccggtacctggcggcgcgcatgaaaccttaagcgagctggcggtcaccacgccggatgccgcccgcgccacgctggaagcccatcgtcacgcctttgaaaagcaaggtttgaatgccatctggccacgcatcattgccctggtggttcaacccggcgtcgaattcgatcacaccaacgttattgattatcagcccgccaaagcgagcgccttaagccagatggtcgaaaactacgaaacgctgattttcgaagcgcactctaccgattatcaaacgccgcaaagcctgcgccagctggtgattgaccactttgccattctgaaagttggcccagcgctgaccttcgccctgcgtgaagctctgttctctctggcggcgattgaagaagaactggtgccagcgaaagcctgttctggtctgcgtcaggtgctggaagacgtgatgctcgaccgcccggaatactggcaaagccactaccacggtgacggcaacgcgcgtcgtctggcgcgtggttatagctacagcgatcgcgtgcgctattactggccggacagccagattgatgacgctttcgctcatctggtacgtaatctggcggatagtccaattccgctgccgctgatcagccagtatctgccgctgcagtacgtgaaagttcgctccggcgagctgcagccaacgccacgggaactcattatcaaccatattcaggacatcctggcgcagtaccacacagcctgtgaaggccaataagcaaaacaaagaggaacacgctatgccaaatattgttttaagccggattgatgaacgcttgattcacggtcaggtcggcgttcaatgggtcggatttgcgggggcaaatctggtgctggtagccaacgatgaggttgccgaagatccggtacaacaaaacctgatggaaatggtactggcagaagggatcgccgtacgtttctggacgctgcaaaaagttatcgacaacattcatcgcgccgccgatcgacagaaaatcctgctggtttgtaaaacacccgccgatttcctgacgctggtgaaaggtggcgttccggtgaatcgcattaacgttggcaatatgcactacgccaatggcaaacaacaaatcgccaaaacggtttctgtggatgcgggcgatatcgcagcatttaacgacctgaaaaccgctggggtggaatgcttcgttcagggcgtcccgacagagcctgctgtggacctctttaaattactttgagggattcatcatggaaatcagcctgttgcaggcatttgcgttgggcattatcgcctttatcgctggcctggatatgtttaacggcctaacccatatgcaccgcccggtggtcctcggcccgttggtcgggctggtacttggcgatctgcataccggaattttaaccggcggtacgctggaactggtgtggatggggctggccccgctggcgggcgcacagccgcctaacgtgattatcggtactatcgtcggcacggcgtttgccattactactggcgtgaaacccgatgtcgcagtaggtgtcgccgtacctttcgctgtcgcagtacagatggggattaccttcctgttcagcgtgatgtccggcgtgatgtctcgctgcgacctggcaacaaacccgcgccgcatttgatgctggtgccgacggcctggtgcattgctataacgggatgacaggtttacatcaccgcgaaccgggaatggttggcgcgggattaacggacaagcgcgcctggctggaactgatagccgatggtcatcatgtgcatccggcggcaatgagcctgtgttgttgctgtgcgaaagagagaatcgtactgatcaccgacgcgatgcaggcagctgggatgccggatggtcgctatacgttatgtggtgaagaagtgcagatgcacggtggcgttgtccgtaccgcgtctggtgggctggcgggcagtacgctgtctgttgatgcggcagtgcgcaatatggtcgagttgacgggcgtaacgcctgcggaagccatccatatggcgagcctgcatccggcgcgaatgctgggtgttgatggtgttctgggaagccttaaaccgggcaaacgcgccagcgtcgttgcgctggatagcgggctacatgtgcaacaaatctggattcagggtcaattagctagcttttgatagtttgctcctttattgggccttcacttcccccgtaaggcctttctttttctttcgttttgatctgtgcagcggtgtcggatgcgacgctaacgcgtcttatccgacctacagttggtgaccgcaaggccggataaagcgtttgcgccgcatccagcaatcccttttgcttcctttatcttttctttcaacgatcacaaatttcgttttatttcttttttctccattgaactttcagtttcttttctatagattttaatcaacgaaagacatcaccaagtgaaatgaaacgaaaggcaagtgaaagcgacaacgcccgacgtcaagttcatcagactaaggattgagttatgccagaaaattacacccctgctgccgccgcaaccggtacatggactgaagaagagatccgccatcagcctcgcgcatggatccgtagtctcaccaacatcgacgcgctacgttccgcgctcaataacttccttgaaccgttactgcgcaaagagaatctgcggatcatcctgaccggagccggaacgagcgcatttatcggtgacatcatcgcgccgtggctcgccagccataccggtaaaaacttcagcgccgtaccgaccaccgatctggtcaccaatccgatggactacctgaacccagctcatccgctgctgttgatctccttcggtcgatccggcaacagcccggaaagcgtcgcagccgtggaactggcaaatcaatttgtaccggaatgctatcacctgccgatcacctgcaacgaagcgggcgctctttaccaaaacgcgatcaacagcgataacgcgtttgccctgctgatgcccgcagaaacgcacgatcgcggctttgcgatgaccagcagcattaccaccatgatggccagctgcctcgcggttttcgcacctgagacgatcaacagccaaaccttccgcgacgtggcggatcgttgccaggcgatcctgaccagtctgggcgatttcagcgaaggtgtgtttggttacgcaccgtggaaacggatcgtttatctcggtagcggtggcttacagggcgcagcacgcgagagcgcgctgaaagtgctggaactgacggcgggtaaactggcggccttttatgattctccaaccggattccgtcatggaccaaaaagcctggtcgatgacgaaacgctggtggtggtatttgtctccagccacccttacacccgtcagtatgatcttgatctgctggctgaacttcgccgtgacaaccaggcaatgcgtgtaatcgccatcgccgcggaaagcagcgacatcgtcgctgccggtccacatatcatcctgccaccgagtcgtcactttatcgacgttgagcaggcattttgcttcctgatgtacgcccagacgtttgcactgatgcagagcctgcacatgggcaatacgccggataccccaagtgccagtggcaccgttaaccgcgtggtgcaaggcgtaatcattcatccgtggcaggcataagaggatcgcattatgagcattatctccactaaatatctgttacaggacgcccaggccaatggctacgcggtgcctgcttttaacattcataacgccgagacgatccaagcgatcctcgaagtgtgcagtgaaatgcgaagcccggtgatcctcgccggaacgccggggacctttaaacacatcgcgctggaagagatctacgccctgtgtagcgcctattccacaacctacaacatgccactggcgctgcatctcgaccaccacgaaagcctggatgatattcgccgtaaagtccacgcaggtgtgcgcagtgcgatgatcgacggcagccacttcccgtttgccgagaacgtgaagctggtgaaaagcgttgttgacttctgccacagtcaagattgcagcgtggaagcagaactgggccgcctgggcggtgttgaagatgacatgagcgttgacgccgaaagtgcattcctgaccgatccacaagaagctaaacgctttgtcgaactgactggcgtcgacagcctggcggtagcgattggtacggcgcacggcttatacagcaaaacgccgaagattgatttccagcggctggcggaaattcgtgaagtggtggatgttcctctggtgctgcatggtgccagcgatgttccggatgaatttgtccgtcgcactattgaacttggcgtcacaaaagtgaacgttgccacagaattaaaaatagccttcgctggcgcggttaaagcctggtttgcggaaaatccgcagggtaacgatcctcgttattatatgcgcgtcggaatggatgcgatgaaagaagttgtcagaaataaaattaatgtctgtggtagtgcgaatcgaattagtgcataatcattagttttttatgatttatcccaatgtacttcccgattaatatcggggagtgccttaatggaaaaggagataactaaaccttaataaatacatcactacaatatcgcaacaataatatatttaaaaaaattatattattcaactttatggtgaggattacacaatgaccagtccaaatattctcttaacccgtattgataaccgtctggttcacggtcaggttggcgtgacctggacatccaccatcggtgcaaatctgctggtagtcgtggatgatgttgtcgctaacgatgatattcaacagaaattaatgggtattaccgcggaaacctacggctttggcattcgtttctttactatcgaaaaaaccattaacgtcatcggcaaagctgcaccacatcagaagatcttcctgatttgccgtacgccacaaacggtacgtaaattggtagaaggtggtattgacctgaaagatgtcaacgtcggcaatatgcatttcagcgaagggaaaaagcaaatcagcagtaaagtttatgtcgatgaccaggatctcacggacttacgttttattaaacaacgtggcgtgaatgttttcattcaggacgtccctggcgatcaaaaagaacaaatccctgactaaatctaaaatcgccttaatattggtttgaggtaataaaaatgcatgaaataaccctacttcagggattatccctggcggcgttagtttttgttctggggattgatttttggctggaagccttatttttattccgcccgataatcgtttgtaccctaactggcgctattctcggtgatattcagactggcttaattaccggtggtctgacagagttggctttcgccggattaacccctgcaggtggtgttcagccgcccaacccgattatggcgggtctgatgaccaccgtcattgcatggtctacgggcgttgatgccaaaacagcaattggtcttggcctgccgtttagtttgttaatgcagtacgtcattctgttcttctattccgctttcagtttatttatgaccaaagccgataaatgcgcgaaagaggcggatacggcagcgttttcccggcttaactggacaacgatgctcatcgtcgctagtgcgtatgcggtgattgctttcctctgtacttacctggcacagggggcgatgcaggcgctggtgaaagcgatgcccgcctggctgacccacggctttgaagtggctggcggtattctgcctgccgttggttttggcttgctgctgcgcgtaatgttcaaagcgcaatatatcccttacctgatcgccggtttcctgtttgtttgctacatccaggtcagcaacctgttgccggttgccgtactgggcgcaggctttgcggtgtatgagtttttcaatgcgaaatcccggcagcaagcgcaaccgcagcccgttgccagtaaaaatgaagaagaggactacagcaatgggatctgaaatcagtaaaaaagatatcacccgtctgggctttcgtagcagcctgctgcaagcgagctttaactacgaaaggatgcaggcgggcggttttacctgggcgatgttgccgatcctgaaaaagatttataaggacgacaaaccgggcttaagcgcggcgatgaaagataacctcgaatttattaatacccacccgaatctggtcggattcctgatggggttattaattagcatggaagaaaaaggagaaaaccgcgacaccattaaaggcctcaaagtggcactgtttggcccaatcgccgggattggcgatgcgattttctggtttactttgttgccgattatggcgggaatttgcagtagttttgccagccagggaaacctgctggggccgattctatttttcgccgtttacctgcttatctttttcctgcgcgtcggctggacccacgtcggttatagtgtcggcgtgaaggcgatcgataaagtgcgagagaacagccagatgattgcccgtagcgcaaccatcctcgggatcacggtaatcggcgggctgatcgctagctatgtgcatattaacgtggtgacaagctttgccatcgacaatacccacagcgttgcgctgcagcaggatttcttcgataaagtcttcccgaacattttaccgatggcctacaccctgctgatgtattacttcctgcgggtgaaaaaagcgcatccggtgctgttaatcggcgtgacttttgtgctctctattgtttgttccgcattcggcattttgtaaatggaacgaggcactgcgtctggtggtgcctctttacttaaggaatttcatcctgtgcaaacccttcagcaagttgaaaactatacggcgttaagtgaacgtgccagcgaatatttattggccgtgatccgtagcaaaccgaatgccgtgatttgcctggcgaccggagccacgccattactgacgtatcattatctggtagaaaaaatccaccagcagcaggttgatgtcagccagctcaccttcgtgaagctcgacgaatgggtggatctgccattaacgatgccaggcacctgcgaaactttcctgcaacagcatatcgtgcagccgctggggctacgtgaagaccagctcatcagctttcgctccgaagagataaatgagacagagtgcgaacgggtaacgaacctgattgcgcgcaaaggcggtctggatttatgcgttctcggattggggaaaaacggtcatcttgggctgaacgaaccgggagaaagcctgcaaccggcctgccatatcagtcaacttgatgccagaacacagcaacatgagatgttaaaaaccgcgggtcgccccgtgactcgtgggatcaccttaggcctgaaggatattctcaatgcccgcgaagttttgttactggtgactggcgaaggaaagcaggatgcgacagatcgttttctcacggctaaagtctctaccgctatcccggctagttttttatggctgcacagtaactttatttgtttaattaacacctaaccagatgaaaaatttgctcaaaatgtttaaattaacttatgtaacagtcacgcattatattaaataacatttgactgggttgaacataacgccgatagcaaaaggagttatgttcaacaatttaattttagatatacatataacttgttctattaataaatcacctcgtattctgactcgccccctggcgcagcaaagtcaggcatttatactcttttgaatacatagaaaattgatatcaatataatgaaaatatcaaatatttgcatataaatataatcttaaagttcagtctatttaatgttcaatgaaatatttctgcctgtataatctttaaagatgttgaacatatattcacattaaatatgattatgtacttgttacaaggataaggttatatatgaataaagttacaaaaacagctattgcgggcttacttgcgcttttcgcaggtaatgccgctgcaaccgatggtgaaatagtttttgatggcgagattttaaaatccgcttgtgaaatcaatgactctgataagaaaattgaagttgctcttggtcactataatgccgaacagtttcgtaatattggcgagcgtagcccaaaaattccattcactattcctttagttaactgcccaatgactgggtgggagcacgataacggcaacgttgaagcgtctttccgtctatggctggaaacgcgagataatggcaccgtccctaacttccctaatctggcaaaagtaggctcttttgctggcatagcggcaacaggtgtgggtatccgtattgacgatgcggaaagcggaaacattatgccactgaatgctatgggcaatgataacacggtttatcagatcccggcggaatccaatggtattgtcaatgttgacctcatcgcttactacgtaagtaccgtagttccaagtgaaatcaccccaggggaagcagacgctatcgttaacgtaacgctggattaccgttaatacgttagggcgttatctgacctgtcagataacgcccttttccttcctctttctcgttgtatcaggttgaaaaataactatgagtaaacgaacattcgcggtgatattaaccttgttgtgtagcttctgtattggccaggcgcttgcaggaggaatcgttttacagcgaacgcgagtgatctatgatgccagccgcaaagaggctgcgttacctgtcgcaaacaaaggcgcagaaacgccttatttactgcaaagttgggtagataatatagatggtaaaagccgtgccccatttattataaccccaccgctatttcgtcttgaggctggcgatgacagtagtctgcgaattattaaaacagctgataacctgcctgaaaataaagagagcctgttctacattaatgttcgtgccattccagcaaagaaaaaaagtgatgatgttaatgctaacgagttgacgctggtatttaaaacacggatcaaaatgttttatcgccccgcacacctgaagggacgggtaaacgatgcgtggaaaagtctggaatttaaacgtagtgaccatagtctcaatatatataacccaactgaatattacgtcgtatttgccggactggcagtcgataaaaccgatctcacaagcaaaattgaatatatcgcgcccggagaacataaacagttaccacttcctgcatctggcggaaagaacgtgaaatgggctgcgatcaatgattatggcggcagttccgggacagaaactcgtccactgcaataaaaaatataaaaacacaggtcatcagggaatgccacaacgacaccaccagggacataaacgcacaccgaaacagttggcgctcatcatcaaacgttgtttgccgatggtgctcactggcagcggcatgctttgcactaccgctaacgccgaagagtattatttcgaccccattatgctggaaaccacaaaaagtggtatgcaaacaaccgatctgagccgttttagtaaaaaatatgcacaactaccaggaacttatcaggttgatatctggctgaataaaaagaaggttagtcagaaaaaaattacatttaccgccaatgcagagcaacttctgcagccacagtttacggtagaacaactacgtgagctgggtattaaggtggatgaaatcccggcgctggctgaaaaagatgacgatagcgtgatcaacagccttgaacaaatcattcccggtacagctgctgaatttgatttcaatcatcagcaacttaatttgagcattccccaaattgcactgtaccgtgatgcaagaggttacgtctccccttctcgttgggacgatggtataccaacgctgtttaccaactacagctttacaggttctgataaccgttaccgccagggcaatcgtagccaacgacagtacctgaatatgcaaaatggtgctaattttggcccctggcgattacgcaactattccacatggacacgcaacgatcagacaagtagctggaataccatcagtagttatttacaacgtgatatcaaggcgttgaagtctcagttgcttctgggagaaagcgccaccagcggcagtattttttccagctacacctttactggcgtgcaactcgcttccgacgataatatgttgccaaacagccagcgcggatttgccccaacggtacgcggtatcgcaaacagtagtgcaatcgtgactatcaggcaaaatggttatgtgatctatcaaagcaacgtgagtgcgggtgcctttgaaattaacgatctctacccctcttccaacagcggcgatttagaagtcacgattgaagaaagtgacggtacacaacgtcgctttatccagccttattctagtttacccatgatgcagcgacctgggcatctaaagtatagcgcgaccgctggacgctatcgcgctgatgcaaacagtgatagcaaggaacccgaatttgctgaagccacggcaatatatggtttgaataatacttttacgctgtatggcggcctgctcggttctgaagattattatgcgctggggatcggtatcggcggcacacttggcgcactgggcgcgttgagcatggatatcaacagagctgacacccaattcgataaccagcactcttttcatggctatcaatggcgtacgcagtacatcaaagatatcccggaaaccaacaccaatatcgctgtcagctactatcgctataccaacgatggctattttagttttaatgaagccaatacccgcaattgggactataacagtcgccaaaaaagtgaaattcaattcaacatcagccagacaatatttgatggggtaagtctgtatgcctccggtagccagcaagactattggggcaataacgataaaaacaggaatatctctgttggggtttccggccagcaatggggagttggttacagcctgaattatcaatacagccgctacactgatcaaaataatgaccgcgcactctctttgaatctcagtattccgttagaacgctggttaccgcgtagccgggtttcctatcagatgaccagccagaaagatcgcccaacccaacatgaaatgcgtcttgatggcagtctgctggatgatggtcgcctgagctatagcctggaacaaagtctggatgacgataacaaccataacagtagcctgaacgccagttaccgtagtccttatggcaccttcagtgccggatacagctacggtaatgacagcagccaatacaattacggcgttaccggcggcgtggttatccatcctcatggcgtgacgctcagccaatatctgggcaacgcttttgcgcttatcgatgctaacggagcatctggcgtgaggatacaaaactatccggggattgctaccgatccttttggctatgcagtggttccttatctcacaacttatcaggaaaaccgtctcagcgtagatactacgcagctgcccgataacgtcgatcttgaacaaacaacacagtttgtggtgcccaacagaggtgcaatggtagcggcgcgtttcaacgccaatatcggttatcgcgtacttgttacagtcagcgatcgcaacggtaaaccgttgccctttggcgctcttgccagcaacgatgatacggggcaacaaagtatcgtcgatgagggcggcatactatatctctctgggataagcagtaaaagtcaaagctggactgtacgctggggaaatcaggcagatcaacaatgtcagtttgctttcagtacaccggatagtgaacctacaacctctgtattacaaggcacagcgcagtgccattaaggataaaaaaatgaaaagagcgcctcttataacaggtcttttgttgatatccacatcctgcgcttatgcctccagtggagggtgtggagccgacagcactagcggtgcgacaaattacagcagtgtggttgatgatgttacggtgaaccagacagataacgtgacaggacgggagtttacctctgcaacgctaagtagcactaactggcaatacgcctgttcctgctctgcgggtaaggcagttaaacttgtctatatggtcagccccgtacttaccaccactggacatcagacaggatattacaaactcaatgacagcctggatattaaaaccacattacaggcaaacgacattccaggactcacaaccgaccaggttgtctctgttaacacccgattcacacagataaaaaacaacacggtatattctgctgcaacccaaacgggtgtttgccagggtgatacgtctcgttatggacccgttaatattggtgcgaacaccacctttaccctgtatgtcaccaagccatttctcggcagcatgaccattccgaaaacggatattgccgtcattaaaggcgcgtgggtcgatggaatgggaagcccgtctacaggtgacttccatgatttagtcaagttaagcattcagggaaatctcaccgccccacagagctgcaaaattaatcagggcgatgttattaaggttaattttggattcatcaatggtcagaagtttaccacccgcaatgccatgccagacggttttactccagtagactttgatatcacttatgactgtggtgatactagtaagattaaaaacagcttgcaaatgcgcatcgacggtacaactggggtagtagaccagtacaacctggtcgccaggcgaagaagtagtgacaatgtgcccgatgtcggtattcgtattgaaaatctcggcggcggagttgcaaatattccttttcagaacggtatccttcccgttgatccttccgggcatggcaccgtcaatatgcgcgcctggccagttaatctggtcggtggtgagctggaaacaggaaaatttcagggcacagccaccattaccgtcatcgtgcggtaaaagaagacgttgcgttttgattaacgcaacgcttcggcactgttacccctgctgctccagcgcatacttatacagcgcatttttcttcacgccgtgaatttctgcggccagcgccgccgcttttttcagcggcagttctgcctgtagcagcgccagcgtgcgcagggcatcggcgggtaagtcttcttcctgtgctttatgaccttcgacaatcagcaccatttcgcctttgcgacggttttcatcttcctttacccacgccagcagctcgccaacgggcgcgccgtgaatggtttcccaggttttggtcagctcacgcgccagaaccacgtagcgggattcgcctaataccgcaacgatatcttccaggctatctaacagacggtgggtagattcataaaaaatcagcgtgcgcggctccgcttcaatggcttttagcgcatcacggcggcctttacttttggcaggtaaaaagccttcgtaacagaaacggtcagagggtaaacccgctgcgcttaacgcagtgatagcagcacacggcccgggtagcggcaccacgcggatccccgcttcacggcaggtacgcaccagatggtagccaggatcgttaattagcggcgttccggcatcggaaaccagcgcaatgttttgcccctcttgcagcttcgccagcagcgtttcagctttttgttgttcgttatggtcgtgcagcgcaaacaaccgggcattaatcccaaaatgttgcagcaataaaccggtgtgacgagtatcctcggcggcaatcagatcaacggcctgtaatacctctaacgcacgctgggtgatatccgccagattgccgattggcgtcggtacaatgtaaagctggccctgagaattatccgcgctttggtgttgtttcattgtgtcgtccgtattgccgatttaatattgagcattgcgtaaaaaaaatatcactggatacattatggtacccagtacattttctcgtttgaaagccgcgcgttgtctgcctgttgttctggcagccctgattttcgccggttgtggcacccatactcccgatcagtccactgcttatatgcagggcacggcgcaggctgattctgccttttatcttcagcagatgcagcaaagctctgatgataccaggatcaactggcaattactcgccattcgtgcactggtgaaagaaggtaaaaccgggcaggcggttgagttgtttaaccaactaccgcaagaactgaacgatgctcagcgtcgcgagaaaacactgctggcggtagagattaaactggcgcagaaagattttgctggcgcgcaaaacttgctggcgaaaatcacacctgccgatttagaacaaaaccagcaagcgcgttactggcaggcaaaaatcgatgccagccaggggcgtccttccattgatttactgcgcgcgttaattgctcaggaaccgctgcttggcgcgaaagaaaaacagcagaatattgatgccacctggcaggcgctctcctccatgactcaggaacaggcgaatacgctggtgatcaacgccgacgaaaatattctgcaaggctggctggatctgcagcgcgtctggtttgataaccgtaacgatcccgacatgatgaaagccgggatcgccgactggcagaaacgttatccgaacaatccgggcgcgaaaatgctgccaacgcagttggttaacgtaaaagcgtttaaaccagccagcaccaacaaaatcgccctgctgttgccactgaatggccaggcagcggtatttggtcgcactattcagcaaggctttgaagcggcgaaaaatatcggcactcagccagtggcagctcaggtagctgccgcacctgccgcagacgtagctgaacaacctcagccgcaaaccgtggatggcgttgccagcccggcacaagccagcgttagcgatctgaccggtgaacagcctgcagcccagccggtgcctgtaagcgccccggcgacaagcaccgcagcggtaagcgcacccgcaaatccatccgcagagctgaaaatctacgataccagtagtcaaccacttagccagatcttaagccaggttcagcaggatggcgcgagtattgtggtcggtccgttgctgaaaaataacgttgaagagttgctgaagagcaacactccgctgaacgtactggcactgaaccagccggagaatatcgaaaatcgcgtcaatatttgttacttcgcgcttagtccggaagacgaagcgcgcgatgcagcgcgtcatattcgtgaccagggtaaacaagcgccgctggtgctgatcccacgcagtagtttgggcgatcgcgtagccaatgcgtttgcgcaagagtggcagaaactgggcggcggcaccgttctgcaacaaaaatttggttccaccagcgaattacgcgcgggtgttaacggcggttctggtattgctttaacgggtagcccgattactctcagagcgacaaccgactccggcatgacgaccaacaatccaacgctgcaaaccacgccaaccgatgaccagttcaccaataatggcggtcgtgtcgatgcggtgtacattgtggcaacgccgggtgaaatcgcttttatcaaaccgatgatcgccatgcgtaacggtagccagagcggtgcaacgctgtacgccagctcccgcagtgcgcaagggaccgctggcccggatttccgactggagatggaaggcttgcagtacagcgaaatcccgatgctggcaggcggtaatctaccgttaatgcagcaggcactcagcgcggtgaataacgattatagtctggctcgcatgtatgcgatgggcgtcgatgcctggagcctggcaaatcatttcagtcaaatgcgccaggttcagggttttgaaatcaacggtaataccggaagcctgacggctaacccggattgcgtgattaacaggaacttaagttggctacagtaccaacaaggtcaggtagtccccgtcagttaaattaagtgattaacaggaacttatcatggctacagtaccaacaaggagtggtagtccccgtcagttaaccaccaaacagaccggcgatgcgtgggaagcacaagcgcgtcgctggctggaaggcaaaggactgcggtttatcgccgctaacgtgaacgagcgtggcggcgagatcgatctgataatgcgtgaaggccggaccaccatttttgtcgaggtacgctatcgccgctctgcgctttatggcggcgcggcagccagtgtgacccgcagcaaacaacacaaattattacagactgcccgcttgtggctcgcgcgtcataatgggagttttgatactgtggattgccggttcgatgtggtagccttcaccgggaatgaggttgagtggattaaggatgcctttaatgaccacagttaattaaggtttaaggattagcgtgcaagaaagaattaaagcttgcttcactgaaagcattcaaactcaaattgcggcggcagaggcgcttccggatgccatctcccgtgcagccatgacgctggttcagtctctgctcaatggcaacaaaatcctctgttgtggtaatggaacttccgctgccaatgcacagcattttgctgccagcatgatcaaccgtttcgaaacggagcggcccagcttacctgccattgcactaaatactgataatgttgtcttaacggcgattgccaacgatcgcttacatgatgaagtgtatgcaaaacaggtgcgggcgctgggtcatgcgggagatgtattgttagccatttccacccgtggcaacagccgcgatattgttaaagcagttgaagccgccgttacgcgtgatatgaccattgtggcattgaccggctatgacggcggcgaacttgcaggtttgttagggccacaggatgtggagatccgcattcctagccatcgtagtgctcgcattcaggaaatgcatatgctgacggtaaattgcctgtgcgatctgatcgataacacgcttttccctcaccaggatgattaaggagaatacatgaaggcattaagcccaatcgcagtccttatttccgcgctgctgttgcaaggttgtgttgccgctgccgtagtgggtaccgctgctgtgggtaccaaagccgcaactgacccacgcagtgtcggcacccaggtggacgatggtaccctggaagtgcgcgtgaacagcgcattgagcaaagacgaacagattaagaaagaagcgcgcattaatgtaacggcctatcagggcaaagtgctgctggttgggcagagtccaaatgctgaacttagcgctcgcgccaaacagattgctatgggcgtagacggtgccaacgaagtgtataacgagattcgtcagggccagccgattggtctgggcgaagcatctaacgatacgtggatcaccaccaaagtgcgtagccagctcttaaccagcgacctggtgaaaagctccaacgtgaaagtgaccaccgaaaacggtgaagtgttcctgatggggctggtgactgaacgtgaagcgaaagcggcggcagatattgccagccgggtgagcggcgtgaagcgggtaactacggcgtttacgtttattaaataacagccccttgtaatgcctgatgcgacgcttgccgcgtcttatcaggcctacaacgatacaaaccgtaggtcagataaggcgtttacgccgcatccgacatgttttccctcaaatcagaacaacagcgccagcccgccgacaatcacaccagacactgccaccatcgcccctgtcagccataaggctttcgccgggaacgctttgcgcagcataatcagactcggcaaactcactgccgggagcgtcatcaacaatgccagcgccggagcggttcccatacctgccagcatcatcgtttgtacaatcggaatttctgctgccgtgggaatgacaaacaagcatcctgctaccgccatcgccaccacccacatcaggctgttatcgacagcaccatcggcatgggggaataaccagacgcgagcggcacccaacaccagtactgcaaggatgtaaaccgggatcgtactccagaaaagcgtccatagcgccctgccccagcggctaaaaaacccgccctgtgcttccggtatgtcaatttcgaccggtgcctgcgtttgcggtgtttcacgcacccatttttgcaccagcgtcgcaatcagcaacaccatcaccagcccggccaccagacgaatcgccgcaaaaccccagccgaggacaaagcccataaacaccagcgtcgccgggtttaacaccggattgcccatccagaatgccagcgcaccgcccatgctcacctgttggcgacgcattcccgccgcgaccggagccgcacagcaggtacacatcatgcccggcaagctaaacagcgttcccagcagcgtgccgcgaaagcggctttgcccaagcgtacgcaacaaccagtcacgcgggatcagcacctgaatcaagctaccgaggatcacccccagcaccgccgctttccataccgcgaggaaatagatcatcgcgtaatccaacgccgcctgccatgggttagcatccgcctgcgcaaggatagatttaccgatactgtgggtttcggcagcagtaaacgctttgccgtagtaaggttcccatttcacataccagagaccggcaatgacaacgagaaagaaaagcgcgggtttccaccactgaatgggcgttgccgcctgagaactagactgaccagtcatagcattccccaggaataagttatgataattgagcgcgtgaatattacgctcactatcaattcttgggaataattattcagctcttttgcgtaattcactagagcttaaaatcgtcacgccttcatgctcaggccgcatgctctctgccagcatgacccgcgccacgtctctcgcatcaatggatttccagttacctggtaacaaacggaacagcggcgcaaaaagcgtttcgttcatccgctgtttgctacgatcgcccagtaacatgctcgggcgagcaatggtcaatttcggccagttctgggcgattaatgcttcttccatctcccctttgacgcggttatagaaaaacgggctgtgggcattggcacccatcgcactgactaccaacatatgctgcgcgcccagtcgccgcccggttaatgcggtatccactaccagcgtgtaatcggcatgaataaacgcctctttgctccccgcttctcgccgcgtggtgccgagacaacaaaacacaatgtcgatgggatcggtgacctgcgccaacgcgtcactcagttgcggatcatggggattaaacaccccgggcatatcgcccaacggacgtcgcgtcggcgcagcaatggcgttaactttcggttcgttaatcaacatccgcagcaggtgaccgcccaccagccccgttgcgcctgtaatcagtacctgactcatcttcgctcctttacagaattgtctgccttgcgctccacggctcatgcaccaggcttaatagaccatgaggtaattatccccgattgtgggaaattcgcctcatccaatgcaacaacgcggaggaagcatgagtaagaaaattgccgttttaatcactgatgaatttgaggatagtgaatttactagtcccgcagacgagttccgtaaagccggacacgaagtgattaccattgaaaaacaagcgggtaaaacggtgaaaggcaaaaaaggagaagccagcgtgaccatcgataaatccatcgatgaagtgacgcctgcggagtttgatgccctgctgctaccgggcggccatagtccggattatctgcgtggggacaaccgttttgtcacctttacccgtgattttgtgaatagtggcaaaccggtgtttgccatctgtcacggcccgcagttgctgatcagcgccgatgtgattcgggggcgcaaactgaccgcagttaaaccgatcattattgatgttaaaaatgcgggcgcggaattttacgatcaggaagtcgtggttgataaagatcagctggttaccagccggacaccggacgatctgccagcgtttaaccgcgaggcgttacgcctgctcggtgcctgattacgcctgctcggtgccactgtcgcgtagccaaatcatttttttaccaaagcccagcgtgttgtcggtgaatttgatttcatcgagccggatttcccacaccggggcgctcagcattctggcaaccggaaagcgacgattgtacgccttgcgcgcgaggtcgctttcctcaccttccagcctgcggatctcacctttaaactgcacaccgcgaattaacgctaccgttttcggctgaccgtttaccgttccggcaaccgcagcctgcggcccactcatctgcgcgtggcgcgttttttcttccgtcaaaatgtagaaggcgactttctgcgcatcaaaaagataaaaggcattagcgcaccagagttccccttcctgctgcacacaccaagtgacaacatgttgttttgccagccaacggctgatggcgatgagtgtttccattgctgttctcttttatactgtgggcctgaccttaacatgcgacgcagacgatgacaccctggtttctttacttgatccgtaccgccgacaataagctttataccgggatcaccacggatgtcgaacgccgctatcagcagcaccaaagcggcaaaggggcgaaagcactgcgcgggaaaggagaactaacgctggtgttttccgcgccagtgggcgatcgtagcctggcgttacgggcggaatatcgcgttaagcaactgaccaaacggcaaaaagagcgtctggtagcggaaggcgcagggtttgcagagctgttaagcagtctgcaaaccccggagattaaaagcgattgaaatgctcgtgatactcaaccaggccggtaacgccattcagcgcgtcatccgctaaacgatgtacctggaaggcgctttcagtgcccggccagcggcaacgcagatcgtgatgcgccgccagttcaaagccgaaacgactgtacagcgccggatcgcccagcgtcaccactgcggcatagccgaactcattaaggctatcgagtccttcatagaccagttggcgtgccagcccctgtccacggtatttttcatcaaccgccaacggtgccatgccgacccattgcaggtcttcgccctgcacatcaaccggactaaatgccacatagccaatgacctgaccttcgtcatctgtcgccaccagccccagcgtcagaaagccatcttcacgcagatcgtgaaccagcttcgcttccgcatcactttcgaaactgcgacgcagcagggcatcaatacccggcgcatcaatgggaatttctactcgaattagcatggttcacctacgcttgtctgtttggtttcaggcgcggttttcattcccgcctcaacaaaatccgccagttgcagcagcatcatgcgtaaggctttcggcatttgctccagttcaatggcgtccatcaggtttttcacatacagccccagctccgtatcgccttcaatcaccagccgacgctggaagaagagcgtatccggatcttgtttacgcgccgcaatcatcagcagatcgctggcgtcggcactaaaactcacatcagcttgcgcgttctggctaacgaccagtttgccattcaccacgctggtaaaccattgcaggtcaatatcacgcacatgaatacttaaccagcggccttcaagaaactccagctcgccatcatccagcgcctggcggaattgccagcttaagacctgctcaagaacctggcgttttagcgcaaatggcgtcagttttaccggtacactcaacagagatggccccaaatgcacaatacgggaacgcagtttatccaacacgagttttactccctgtttcaacaatcatcctattttgccatatcagaaaaataacatagcggtataaatcaacaattccatatgaaattgctgctaccaccaatacaactttaactgccttaaatcaaaaattgtcgcagcaaggttaactaaaatcccagttcgttaacatttttgcgttttgatagcgcaaccttcaggaaaaattatggagctgctctgccctgccggaaatctcccggcgcttaaggcggccatcgaaaacggcgcagatgctgtttatatcgggctaaaagatgataccaatgcccgtcacttcgccggccttaactttaccgagaaaaaattgcaggaagcggtgagttttgtccatcaacatcgccgcaaacttcacatcgcgattaacacttttgcgcatccggacggttacgcccgttggcagcgcgccgtggatatggcggcgcagctgggtgccgacgcgctgatcctcgccgacctcgccatgctggagtacgccgccgagcgttatccgcatattgagcgccacgtaagcgtgcaggctagcgcgaccaatgaagaggcgattaacttttatcatcgccattttgacgttgctcgcgtggtgctgccgcgcgtgttgagcattcatcaggtgaaacaactggcacgggtcacacctgtaccactggaagtctttgctttcggcagcctgtgcattatgagcgaaggtcgttgctatctgagcagctatctgacgggtgagagccccaacaccataggcgcgtgttctccggcccgtttcgtgcgctggcaacaaacgccgcaggggctggaatcccgcctgaacgaagtgctgatcgaccgttatcaggacggcgaaaacgcaggttatccgacgctatgtaaagggcgttatctggtggacggcgagcgctatcacgcgctggaagaaccaaccagtctcaataccctggaactgctgccggagttaatggcggcgaatattgctagcgtgaaaattgaaggccgccagcgtagcccggcgtatgtcagccaggtggcgaaagtctggcgtcaggctatcgaccgttgtaaggccgatccgcaaaactttgtaccgcaaagcgcgtggatggagacgctcgggagcatgtccgaaggcacgcaaaccactcttggcgcatatcaccgtaaatggcagtgagaaaagcaatgaaatattccttagggccagtgctgtggtactggccaaaagagacgctggaagaattttatcagcaggccgccaccagcagcgccgacgtgatttatcttggtgaagcggtatgcagcaagcgtcgggcaaccaaagttggcgactggctggagatggcaaaaagcctcgccgggagtggtaagcagattgtgctctccacgctggcgctggtgcaggcaagttctgaactgggcgaactgaaacgctatgttgagaacggtgagtttctgattgaagccagcgatctcggcgtggtgaatatgtgcgctgaacgcaaactgccgttcgtcgccgggcacgcgctgaactgctacaacgcggtgacactgaaaatattgctcaaacagggcatgatgcgctggtgtatgccagtggagctttcccgcgactggctggtgaatctgcttaatcagtgcgatgagctgggcattcgtaaccagtttgaagtggaagtcctgagctacggtcatctgccgctggcctactccgcccgctgctttaccgcgcgtagcgaagaccgcccgaaagatgagtgtgaaacctgctgcattaagtatccgaacgggcgcaacgtgctgagccaggaaaaccaacaagtgtttgtactcaatggcattcagaccatgagcggctacgtttacaacctcggtaacgagctggcatccatgcagggcctggttgatgtggtccgcctgagtccgcagggtactgacactttcgcgatgctcgacgccttccgcgctaatgaaaatggcgctgcaccactgccgttgacggcgaacagcgactgtaacggctactggcggcggctggcaggactggagctgcaagcctaagtaaatagctcactttgttaacaactttaactactctttaatgcagtattaaagattaatcggtaacaaagtgagctgttatgactgataaaaccattgcgtttagcctactcgatctggcccccattcccgaaggttctagtgcgcgagaagcattctcccactctctcgatctcgcccgtctggctgaaaagcgcggctatcatcgctactggctggcagaacaccacaatatgactggcattgccagtgctgccacgagcgtattgatcggctatctggcggcgaataccaccacgctgcatctggggtctggcggcgtgatgttgcctaaccacagtccgttggtcattgcagaacagttcggcacgcttaatacactctatccggggcgaatcgatttggggctgggtcgtgctccgggtagtgaccaacggacaatgatggcgctacgtcgtcatatgagcggcgatattgataatttcccccgcgatgtggcggagctggtggactggtttgacgcccgcgatcccaatccgcatgtgcgcccggtaccaggctatggcgagaaaatccccgtgtggttgttaggctccagcctttacagcgcgcaactggcggcgcagcttggtctgccgtttgcgtttgccagtcacttcgcgccggatatgctgttccaggcgctgcatctttatcgcagcaacttcaaaccgagtgcacggctggaaaaaccatacgcgatggtgtgcatcaatattatcgccgccgacagcaaccgcgacgctgaatttctgtttaccagtatgcagcaagcctttgtgaagctgcgccgtggcgaaaccgggcaactgccgccgccgattcaaaatatggatcagttctggagtccgtctgagcagtatggcgtgcagcaggcgctgagtatgagcttggtaggtgataaagcgaaagtgcgtcatggcttgcagagcatcctgcgcgaaaccgacgccgatgagattatggtcaacgggcagattttcgaccaccaggcgcggctgcatagctttgagctggcgatggatgttaaggaagagttgttgggataatgtgtcttaacgcgggaagccttatccgagctggcaacgctgtcctacatagacctgataagcgaagcgcatcaggcattgtgtaggcagcagaaatgtcggataaggcaccgctgattactgatacaccggcagtaaattaaagctgcttaaaatatgcaccagtgcgttgccgacgccaaacaccagaatcagcgcaatcatcggcttgccaccccagacgcggaatttcgggctgccaaagcgtttacggcttgcacgggctaacagcgccggaacaattgccgcccagatggtagccgctaaaccagcataaccaatggcgtacaggaatccgttcgggaacaacagcccccccacaactggcggggcaaaggtcagcaatgccgttttcaagcggcccacagcgctgtcgtcgaaaccaaacagatctgccagatagtcaaacaaacccagcgttacgccgaggaagctactcgctaccgcaaagttactgaacacgaccagcagcagatccagactacggctgttcagtacgccgcttaacgcctgtaccagcacatcaatattaccgcccttctctgcaataccgataaactccggacgcgggatgttacccatcgtcgccagcaaccagatggtatacagcgccagcgccatcagcgtaccgtacaccagatatttcacgatggttttcggatctttgccgtaatacttcatcaggcttggcacgttaccgtgataaccaaagcttgccagacagaacggcagggtcatcaacagatacggtgcataagacgcattgctttcggcgacgttgaacaatgtcgcaggctgcacatgccccagcaggctaccaaaggtgaggaagaaggtaatgactttcgcccccagcacaatcgctgtcatgcgactgacggctttagtgctcaaccacaccacaaacgctaccagcaatgcaaaaccaaaacccgccgcccgtgccgggacgtttagactcatctctgcgaaggtgtgatgcagaatgctaccactggcagaaatataggcataggtcaggatatagagcacaaaggcaatggaaatgccgttgaccacgttccagcctttgcccagcaaatctttggtgatggtgtcaaaactgctaccgattctgtaattcaggttagcttccagaatcatcaagccggaatgcagcatacagaaccaggtaaagatcagcgccgccatactccagaaaaaccacgccccggacatgaccactggcagagaaaacatccctgcgccaataatggtgccgccgataatcaccacgccgccaagcaggctcggactcgtttgggtggtggttagtgttgccatgagggcttctctccagtgaaaaatagtgcgactgcgttgttatgcattgcactgtaccagtacacgagtacaaaagacagaaaaaaagccccgatggtaaaaatcggggctgtatatattattttacagattgtgttcgctgttcagcgatgattacgcatcaccaccgaaacgacgacgaccggtagaatcatcacgacgcggagcgcggccttcacgacgttcgccgctaaaacgacgaccatcaccacggccaccttcacggcgttcaccgctgaagttacgaccgccttcacgacgttcgccaccgaaaccacgaccaccgccacgacgctcaccgccagtatgcggctgtgcatcgcccagtaactgcatgttcatcggcttgttgagaatgcgagtgcgcgtaaagtgttgcagcacttcacccggcatacctttcggcagttcgatggtggagtgagaagcaaacagcttgatgttaccaatgtaacggctgctgatgtcgccttcgttagcaatcgcaccaacgatatgacgaacttcaacaccatcatcgcggcccacttcaatgcggtacagctgcatatcgccaacatcacgacgttcacgacgcggacgatcttcacggtcaccacgcgggccacggtcgttacgatcgcgcggaccacggtcatcacggtcacggaattcacgtttcggacgcatcggcgcatctggcggtacgatcagagtacgttcaccctgtgccattttcagcagtgccgcagccagagtttcgagatccagctcttcaccttcagcagtcggctgaattttgctcagcagtgcgcggtattgatccagatcgctgctttccagctgctgctgtactttagcggcgaatttttccagacggcgtttgcctagcagttctgcgttcggcagttctacttccggaatagtcagcttcatagtacgttcaatgttgcgcagcagacgacgctcgcggttctcaacgaacagcagcgcgcggccagcacgacccgcacgaccggtacgaccgatacggtgaacgtaagactcagaatccatcgggatatcgtagttaactaccaggctgatacgctcaacgtccaggccacgggctgcaacgtcggtcgcaatcaggatgtccagacgaccatctttcaggcgttccagtgtctgttcacgcagcgcctggttcatgtcaccgttcagcgcggcgctgttgtagccgttacgctcaagagcttcagccacttccagagtcgcgtttttggtacgaacgaagataatcgccgcatcaaaatcttccgcttccaggaaacgtaccagtgcttcgtttttgcgcataccccagacagtccagtagctctggctgatgtcaggacgggtagtcacgctggactgaatgcgcacttcctgcggctctttcataaagcggcgggtaatgcgacgaatcgcttccggcatggttgcagagaacagagcggtctgatgaccttccgggatctgcgccataatggtttcaacgtcttcgatgaagcccatgcgcagcatttcgtcagcttcatccagaaccagaccgctcagtttagagaggtccagagtgccacgtttcaggtggtccagcagacggcccggagtaccgacaacgatctgcggcccctgacgcagggcgcgtaattgcacgtcataacgctggccgccgtacagagcaaccacatttacgccgcgcatgtgtttagagaaatccgtcattgcttcagcaacctgtaccgccagttcgcgggtcggtgccagcaccagaatctgtggtgctttcagctcaggatcaagattctgcaacagaggtaaagagaatgctgcagtttttccgctccccgtctgggccatacccagaacgtcgcggccattcagcagatgtggaatacactctgcctgaattggagatggtttttcgtaacccagatcgttaagggcttcaaggataggagccttcaggcccagatctgcaaaagtggtttcgaattcagccatgtagtacgtgtgcctcaaaattaatggcggccagtctacataactcatcatgaaattgatcagcaattttcattgaaaagtgtgaaccggctcaaagtaggtgtattaacgaacaacaacgccctcacccgttaaggtgatggcaatcaaaaaagattacgggctgatgtgtacgtcagttattgctggtcgctttctgccaggtcatcttggtcctggcccaggaggcttaattccaacaatgcgtatcggtgctcaacaaagttatgaacgttgttggcaaccgccagtttgaacagtgccgtggcgctgtccaaatcccccagacttaggtagtacttacctaaatagaagttggtttcactgagatgctcagcgaggctggtgttatccgttgcgtccgccttgagcctttccattaacgtttgttcgctaatgttgcccaggtagaactcgacaatgttccatccccactgttccttatcgcttttttcgaagtgctgtttcaacacttctttagcctgcttctcatcgagcttctgctcggcgagataaagccacagactacggaaaggatcattgggatcgtcttgataaaacgccagcagatcatcttgcgctaacttgtcacgaccgccgtaatataatgcgatcccgcgattcaagtgcgcgtagttgtaagttggatcaagctcaagtacagaatcaaacgcttcataggcagcatcaaaattgcctgcctgcgttaaatatatgcctaagtaattgaatacttcaggcatatccggtcggattgccagcgcttggctaaaatcgttacgcgctaatgccctcagaccgagactatcatacaacactccgcgctcatataaaagctgtgcgcgttcgtcatcggttaaagcccgactggcaaggatttgttccatacgtgccagaatcacttcctgctgtaaagtcggttgcaatggtaccgcgaggacttcacttttacgccaggaagtattactgcatcctgcaagcgtaagtgctgtcgcaacgaaacaccagcgcaaaaaaggcttcatttcccactcccgaagaccacggttgaatgaacgtcctgttcccggttgctaacaaggcgtcctgcccggttaaaagccccccgccgcagcggagggcaaatggcaaccttactcgccctgttcagcagccggagcttccggtgctgcagcaggttgagactgctcagtcgcttctttaatgctcagacggatacggccctggcgatcaacttccagaactttcaccggtacttcctgacccatctgcaggtaatcggtcactttctcaacgcgtttgtcagcgatttgagagatgtggaccagaccttctttaccgccgccgatggcaacaaatgcgccaaagtcaacgatacgggtcactttaccagtgtagacgcggcccacttcgatttctgcagtgatctcttcgatacgacgaatagcatgtttcgctttctcgccgtcggtcgctgcaatcttcacagtaccgtcatcttcgatttcgatggtggtgccagtttcttcggtcagagcacggattacagaaccgcctttaccgataacatctttgatcttgtccgggttgatcttgatggtatggatacgcggtgcgaactcagagatatcgccacgcggcgcgttgatcgcctgttccattacgcccaggatatgcagacgcgcacctttagcctggttcagcgcaacctgcatgatctctttggtgataccttcaattttgatatccatctgcagtgcagagataccgtcgcgggaacctgcaactttgaagtccatatcgcccaggtgatcttcgtcgcccaaaatgtcagacagtacaacgtagttgtcgccttctttcaccagacccattgcgatacccgcaacggcagctttgatcggcacacctgcgtccatcagcgccagagacgcgccgcacacggaagccatagaagaggaaccgttggattcagtgatttcagacacaacacgtacggtgtacgggaatttgtccatatccggcatgactgccagcacgccgcgcttcgccagacgaccgtgaccaatttcacgacgcttcggagaaccgaccatgccggtttcgcctacggagtacggagggaagttgtagtggaacaggaaggtatcggtacgttcgcccatcagttcatcaagaacctgcgcgtcacgagcagtacccagcgttgcggtaaccagcgcctgcgtttcaccacgggtgaacagcgcagaaccgtgagtacgcggcagcacgccagtacgcacatccagaccacggatcatatctttttcacgaccgtcgatacgcggttcgcctgccagtacgcggctacgaacaacgtttttctcgatcgcgtgcagaatttcacccagttcgttttcgtccagggtttcgtcttcagcaagcagcgtcgcgatggtttcagatttgatgacatcaacctgcgcataacgctcttgtttgtcggtgatgcggtaagcatcgctcaggcgagcttcagccagtgcagcaacgcgcgcgtttagcgcttcgtttaccggctccggctgccagtcccaacgcggtttaccggcttctttcaccagttcattgatgttctgaataacaacctgctgttgttcatgaccgaacactactgcgcccagcatctggtcttcgctcagcagttgagcttcagattcaaccatcagtacagcggcttcagtaccggcaacaaccagatccagtttgctctctttcagctcgtcctgagtcgggttcagtacgtactggtcattgatgtaacctacgcgggcagcaccaatcgggccattgaacggaataccagacagagacagcgctgcggaagcaccaatcatcgcgacgatatccgggttaacttgcgggttaacagaaaccacggtggcgataacctgaacttcgttgacgaagccttccgggaacagcgggcgaatcgggcggtcaatcagacgcgcgatcagggtttcgccttcgcttgggcggccttcacgacggaagaagctacccgggatacgaccagcagcgtaggtacgctcctgatagttaacggtcagtgggaagaagtcctgacctggtttggcttttttctggccaacaacggtaacgaataccgcggtgtcatccatgctaaccataacagcggcagtagcctgacgagccatcatgccggtttccagagtcacggtgtgttggccgtactggaatttacgaacgatcggattaagcaatgtaatatcctttctctttcttagacagtaccttacggcactggtgttaataccgcttcttctgcgcatcctcgcgactaatgacaaccctaacccagctctatgtgggtaaagcctctcattagccgcgcgaacctctgcaacggaagatcattcatagcaacaatacattagtttccagtgaattgctgccgtcagcttgaaaaaaggggccactcaggcccccttttctgaaactcgcaagaattagcgacgcagacccaggcgctcgatgagctgggtgtaacgtgctacgtctttacgtttcaggtagtcgagcagtttacgacgctgagaaaccatgcgcagcagaccacgacggctgtggtgatcttttttgtgctctgcaaagtggccctgcaggtggttgatctgtgcagtcagcagtgctacctgaacttcggtagaaccggtgtcgtttgcgtcacgaccaaactcagaaacgattttagctgttgcttcagtacttagagacattttaaaactccaaagtatatagaatgaaaggacgccgatctctaattcagcgatcccagtgtacgttacgcaaagtgttaaacaatttacgcgacgttaagcggcagtattctactcgtagcgacctgttatcgcaagacggttaacattacgccgggtattcaaccaccaggcgacgaggcgcaacgcggccttcatcgtcaatttcgcccataccgataaatttgccgttctcaccttccgtgacgcgaaccagtccttccagtggcgcaccagatgtacgaaccgggttaccatttttgaagtaaacagaagacgttaacggaagattcaccaccggatagtcgctagctggactgtccattggcatcagtaatggatcaagtaactccgcggctggaatatcctgctgttcagcttgctcaacaagttcacgcaggtgctccagggtcaccatccgttcaaccggatatttacttaccgccagacggcgcaggtaaataacatgcgcgccacagccgagtttttcacccaggtcatcaatgatggtgcggatataagtgcctttactgcagtgaatttccagctccagctcattgccttcatggcgaataaacagcaattcataaacggtaatcggacgcgcttcacgcggaacttcaatgccctgacgcgcatattcgtacagttttttgccctgatatttcagtgcactatacatgctagggatctgttcgatatcgccacggaaagtatccagtgccgctgccagctgctctgcgctaaaggttaccggacgttcttcaacgatctgtccgtcggcatcagaagtatcggtacgctgtccaagacgcgcaatgacccgatagcgtttgtcggagtccagcagatactgggaaaacttcgtcgcttccccgaggcaaatcggcaacatgccggtcgccagcgggtccagcgcaccggtatgcccggcacggttggcgttatatatacgtttcactttttgcagcgcatcgttgctggacataccctgaggtttatccagcaacaaaacgccgttaatgtcgcgaccgcgacgacgaggacgactcattagtcctccttgctgtcgtccgggttaacacgacgttcttcgtcatgtttgaccacgctggtcaccaggttactcatgcgcatcccttcaaccagagagttgtcgtagaagaaggtcagttccggcacgatacgcaggcgcatcgctttccccagcaggctgcggatgaaaccagaagcttcttgcaacgctttgatgcccgctttaaccgcgtcttcatctttgtcgttgaggaacgtcacatatactttggcatacgccaggtcgcgagacatttcgacaccggaaacggtggtcatcatgcccaggcgaggatctttaatttcacgctgcaggatgagagcgatctctttttgcatttcctgcgctacgcgctgcgggcgaccaaattctttcgccataataaattctcctgacaaaaaaggggctgttagcccctttttaaaattaatttcaggtggaagggctgttcacgttgacctgataagacgcgccagcgtcacatcaggcaatccatgccggatgcagcgtaaacgccttatcccgcatggaaccctaaaaaccttaagcaatggtacgttggatctcgatgatttcgaatacttcgatcacatcgccagtgcggacgtcgttgtagttcttaacgccgataccacattccataccgttacggacttcgttaacgtcatctttgaagcggcgcagggactccagctcgccttcgtagataaccacgttgtcacgcagaacgcggatcgggttgtgacgtttaaccacaccttcggtaaccatacagcctgcgatggcaccaaatttcgggcttttgaacacgtcacgaacttccgccagaccgataatctgctgtttcagttccggagacagcataccgctcatcgccgctttcacttcgtcaatcaggttatagatgacggagtagtaacgcagatccaggctttccgcttcaatcactttacgtgcagaggcatcagcacgtacgttaaagccaaccaggatggcgttggacgccgcagccagggtggcgtcggtttcggtgataccacctacgccagaaccgatgatcttcactttaacttcgtcagtagacagtttcagcaaggagtcggagatcgcttcgacagaaccctgtacgtctgccttcaggacgatattcacttcgtgaacttcgccttcggtcatgttggcgaacatgttctcgagtttagatttctgctgacgcgccagtttaacttcgcggaatttaccctgacgatagagtgcaacttcacgcgctttcttctcgtcacgtacaacggtaacttcatcacccgcagccggtacgccggacaggccgaggatttccaccggaatggacggacccgcttccagcacttcctgacccagttcgttacgcatcgcacgaacacgaccgtattcgaagccacacagaacgatatcgcccttgtgcagagtaccttcacgtaccagaacggtagcaaccggaccacgacctttatcgaggaaggattcgataaccgcaccgctcgccatacctttacgtaccgctttcagctccagaacttccgcctgcagcaggatagcgtccagcagttcatcgataccggtacccgctttcgcagatacgtgtacgaactggctttcaccgccccactcttccggcaggatgccgtactgggagagttcgttcttaacgcgatccggatcagcttctggtttatcgatcttgttcactgcaaccaccaccggtacctgcgccgctttcgcgtgctggattgcttcgatggtctgcggcatcacaccgtcgtcggcagcaacaaccaggactacgatgtccgttgcctgcgcaccacgagcacgcatactagtaaacgcggcgtgccccggggtgtccaggaaggtgatcatgccgttttcagtttcaacgtggtatgcaccaatgtgctgggtaatgccgcccgcttcgccagaggccactttcgtactacgaatgtagtccagcagagaggttttaccgtggtcaacgtgacccatgatggtcacaaccggcgcgcgcggttcagccgcagcacccgtgtcacggtcgctcattaccgcctcttccagctcgttttcacgacgcaggataactttatggcccatctcttcagcaaccagctgtgcggtttcctgatcgataacctggttgatggttgccattgcgcccagtttcatcatcgctttgatgacctgagagcctttaaccgccatcttgttcgccagttcgccaacggtgatagtttcgccgatcacaacgtcacggttaacggcctgagcaggcttctggaagccttgctgcaggctagaacctttacgttttccgcctttaccgccacgtactgctgcgcgtgcttcttcacgatcagctttactttcagcgtgtttgttgcctttcttcggacgcgctgctttcgcgttacgaccacggccacggccgccttcgacttcacgatcgctttcgtcttctgcctggcgagcatgttgagaagtagtgacgtgataatcgctggaatcttcagtcggttccgcgttatcagtccatttgttttcttccgccatacgacgtgcttcttcagcaacgcgacgtgcttcttcttcgagtttacgacgcgcttcttcttcagctttacgcttgagctctgcagcttcctgctcacggcgggctttttcagcctgggcgtttttagtcatatcgtcttgttgattgctcactttgtctttttccgcagcttcacgtttcgcttgttcagcagcttcacgcttagcttgttctgcggcctcacgttcagctttttgttgcgcctcgcgtttagcgctttcttctgcctcacgacgggcttgctcttccgcttcacgctgcgcttgctcttccgctgcaaggcgttcagcctcttgcggatcgcgtttcacaaaggtgcgtttcttgcggacttcgatttgtacgcttttgctttttccaccggtaccaggaatgttaagggtgctgcgtgttttacgttgcagcgtcaatttgtccgggccactatttttctgattcaggtggtcaatcaaagtctgtttctcttgtgcagacacagagtcgtcagcagacttccggatacctgcatcagcaaattgctgtaccaggcgttccacggaggtctgtcgctctgcggccagcgttttaatcgttacatctgtcatgctgttccttcctgctacagtttattacgcttcgtcaccgaaccagcaaatattacgggcagccataatcagtgctccggctttttcgtcggtcaacccttcgatatcagccagatcatcaatgccctgttcggcgagatcttccagcgtacaaacgccacgggcggccagtttgaatgccaaatcacgatctaccccttcaaggttcagcagatcgtcagccggtttgttatcaccgaggctttcttcctgggcctgtgcaatggtggccagtgcatttttagcacgctcgcgcagtgcttcaacggtcggctcatcaaggccttcgatttccaacagctctttcatcggcacataggccaattcttccagcgtgctgaagccttcttctaccagaacagtcgcgaagtcttcgtcgatgtcgagatatttggtgaaggtgtcgatcgctgcgtgcgcttccgcctgatgcttagcctgcaggtcgtcaacggtcatcacgttgagttcccaaccgctcagctggctagccagacgcacgttctgaccgttacggccaatcgcctgcgccaggttaccggcttcaacggcgatatccatggtgtgtttatcttcatccaccacgatagaagcaacgtctgccggtgccattgcgttaatcacgaactgcgccgggttatcatcccacaggacgatatcgatacgctcgccacccagttcagtagacaccgcctgaacacgcgcgccacgcatacctacgcaagcacctaccggatcgatacgtttatcgttggttttcaccgcgattttcgcacgagaacccggatcgcgagccgctgctttaatttcaatcacttcttcgccgatttctggcacttcaatacggaacagttcgatcagcatttccggcttggaacgagtgacgaacagttgcgcgccacgcgcttccgggcgaacggaatagagcacgccacgaacgcggtcgccagggcggaagttttcacgcggcagcatatcttcgcgcaggatcacggcttcagcgttgttgcccagatccagagagatgttgtcgcggtttacttttttcaccacgccggtgatgatttcaccttcgtgttcacggaactgatcaaccaccatcgcacgttcggcttcacgcactttctgcacgataacctgttttgccgtctgggtagtgatacggtcaaaggtaacagactcaatctgatcttcaacgtaatcgcccaggttcaggctttcatcttcataacgtgcggcttcaagggtgatttccttggtcggctgggtgacttcatcaacaactaaccagcgacggaaagtgtcaaaatcaccgcttttgcgatcgatctgtacgcggacgtcgatctcttgttcatattttttctttgttgctgtcgccagcgcgctttccaatgcttcgaaaatcttctcgcgaggtagcgccttttcattggatacggcttcaactacagccaaaatttctttgttcatcgcgggcttttcacctcatccagactattaaaagtggggaaccaggttcgccttctggatattactcagcgcgaacacttcatctttaccttcgacggtaactgtgatcatttcaccgtctaccgctttgataacgccctgccatttacgacggttttgtaccgccatacggagaaccagagtcacctcttctccgacaaaacgggcgtagtgttcagccgtgaacagtgggcgatcgagacccggactggagacttccaggttataagcaacggtgatgggatcttcaacatccagcacagcacttacctggtggctcacatcagcacaatcatcaacattgatgccatcttcactatcaatatagatgcgcagtgtggatgtgcgaccgcgaataaattcgatgccaaccagttcaaaacccagggcctcaactggcgcagtaatcatctctgttaatttttgctctaatgtggacaagcccacccccaagacataaaaaaagggcctaaagcccagttattctgtagtcagataacaaaaaaccccgataaatcggggctttatataactgaaccctataaccgcaactgcggtctggagcactttccagaaggattttttcaaatcccactacgaaggccgaagtcttcacagtatatttgaaaaaggactctaagggaaagtggttgcgggggccggatttgaaccgacgatcttcgggttatgagcccgacgagctaccaggctgctccaccccgcgcctgaaacgtggcaaattctactcgttttgggtaaaaaatgcaaatactgctgggatttggtgtaccgagacgggacgtaaaatctgcaggcattatagtgatccacgccacattttgtcaacgtttattgctaatcatgtgaatgaatatccagttcactttcatttgttgaatacttttgccttctcctgctctcccttaagcgcattattttacaaaaaacacactaaactcttcctgtctccgataaaagatgattaaatgaaaactcatttattttgcataaaaattcagtgagagcggaaatccaggctcatcatcagttaattaagcagggtgttattttatgacgacgattctcaagcatctcccggtaggtcaacgtattggtatcgctttttctggcggtctggacaccagtgccgcactgctgtggatgcgacaaaagggagcggttccttatgcatatactgcaaacctgggccagccagacgaagaggattatgatgcgatccctcgtcgtgccatggaatacggcgcggagaacgcacgtctgatcgactgccgcaaacaactggtggccgaaggtattgccgctattcagtgtggcgcatttcataacaccaccggcggcctgacctatttcaacacgacgccgctgggccgcgccgtgactggtaccatgctggttgctgcgatgaaagaagatggcgtgaatatctggggtgacggtagcacctacaaaggaaacgatatcgaacgtttctatcgttatggtctgctgaccaatgctgaactgcagatttacaaaccgtggcttgatactgactttattgatgaactgggcggccgtcatgagatgtctgaatttatgattgcctgcggtttcgactacaaaatgtctgtcgaaaaagcctactccacagactccaacatgcttggtgcaacgcatgaagcgaaggatctggaatacctcaactccagcgtcaaaatcgtcaacccgattatgggcgtgaaattctgggatgagagcgtgaagatcccggcagaagaagtcacagtacgctttgaacaaggtcatccggtggcgctgaacggtaaaacctttagcgacgacgtagaaatgatgctggaagctaaccgcatcggcggtcgtcacggcctgggcatgagcgaccagattgaaaaccgtatcatcgaagcgaaaagccgtggtatttacgaagctccggggatggcactgctgcacattgcgtatgaacgcctgttgaccggtattcacaacgaagacaccattgagcagtatcacgcgcatggtcgtcagttgggccgtctgctgtaccaggggcgttggtttgactcccaggcgctgatgctgcgtgactctctgcaacgctgggttgccagccagatcactggtgaagttaccctggagctgcgccgtgggaacgattatagtatcctgaataccgtcagtgagaacctgacctacaagccagagcgtctgacgatggaaaaaggcgacagcgtgttcagcccagatgatcgtattggtcaattgaccatgcgtaacctggatatcactgatacccgcgagaaacttttcggttatgccaaaactggcctgctttcctcctctgccgctagtggcgtgccgcaggtggagaatctggaaaacaaaggccagtaattcgacatcaaccctgcccttcaggggtggggttaccttgcttatcctctgtaaactcctttctgagcatcacataatcgaaaacatcatggtttgcatccacaacccgactgtctcctttatagtgtgcaatcacttcctcaagcgtttgcggctgttccggctttgttacccccatccacgcattaataaggtaattattgtaagctgtgctaaagatgttgttttccgttgtgcgatccacgccatccccaagaacggggctataccagataaacatcgggacatgatatgcctgctggctagcctccctgcctccatgaaaatagacgttcttcttcgtagggtcacgttccaggccgtggtcggcaaaatacatgacgctggcgcggcgatcttttaataattcaaaaacctgacctagcaaactatctgtgtaatgaatggagttgtcatagcaggcatcctgatcgtcctgcggttgaaacacggcgctggattgcggataggcgctacaagccggttcatggcttccatttaaatgaagaacaatcagtttcttttgctgcgtattttgctgtaatgcttggcttaaatgcggcaacaacaattcatcaaatcctctgacataaactgtttccatggcgcgcatggcgatactggtaactgctgtaccattctgccgaaaagcggattggctgcttagccagaaagtctgaaatcctgcttgattagccatattaataatgttgtcggggtaattatgaatgtcatgactcaaaacagaatcagcagttaaagaaaggggaacgctcagcgcagtgtaaggtgcgccgcttattgcttgattaaacagtttgatctgttttctttgtgcttcaacttgcggtgtcgtagagcgtgtatatccatacaaagacatattgtcgacacgtacagactcccccacaatcaacacgtaggtatcaatacctgtatccctgacacttaattgaaaatacggcaccgtgtttgcaatactgagtaatctttgatgctctttcgctgctaaagcaaaatagttgagattgaaaaacggcgtataggtagcaaatcggctcgctagtatatatggactgaacgcttttttattttttgcatctttataagcaaattgacaagcggaaaataaactgccgctaatgacaatcagcaataatattcctgtcactttttttgtcggcaaggaaacatcatattttattattactgccaaaaaaagaagggataaaaaagcaaaggcacatagataagggatatacatccccagcattttgacaacttcatccggatcactctggagcacactaatcgcaaatccatcattgaaagttgtaccaaaggtacaccaactatagaggctaatactcatgtctgccgcagtcagtaacacaaatggtgcggcaacaagcaggcgaagcggaagggaacttatacgttttacaaccaggatggtcagaacgaagaacagcaagcgctgaaccatatgcgctccggaagaagcgactaagttcgtaataccaaaaacaataacacaaagatacaacaaccaatgagatttaaaagttctagcaaatttgttgaatactgtcatccagaaatccaagttcacaaccaatataaacaattatcaacaatgtttaattttatatcagacatgtttttcaactctgatccatatcagaacgaaacactgttagttttttctttttaaatgatgcggccattgcgttctcagtaattaaataacattatcaatgcgtctctaaacattacgcagaacgtagccatcagtcgttatactgacaggagcaggatggtttatcgagaagtaaacatatccgtattcgtaccggaactggagttgacacaataaagtgccaattatgtcagtagaagggaaaaatttataactaaggcgtaccggcaccatcgtttcaaggtaccagctacgagtaaagcaactggacgagatacagatacctgacaaccattcctcagaccaggaccaaaacgaaaaaagacgcttttcagcgtctcttttctggaatttggtaccgaggacgggacttgaacccgtaagccctattgggcactaccacctcaaggtagcgtgtctaccaattccaccacctcggcacggatactactttttagttcgggatatcgctggtcggcttagccggagcagctggctgagtttgttcggttttcgccggtgcactcagattttcccattcgctacctttattggttttgttgctattgatgttacccagcaccagactgatgatgaagaataacgttgccagcagcgccgtcatgcgggtcatgaagttaccagaaccactactaccaaacagcgtagcggaagcgcctgctccgaaggaggctcccatatcagcgcctttaccttgctgcagcatgatcagaccaacaaggccaattgccacaataaggaaaactactaaaagagcttcatacataatcaacctgttccttgcggagttgccgcgtaccaatgcttcaaccaataaagcgggagtttttaatctttcccactgaagcgggtgtgaatactaaccaaagcgaatgaccttcgcaagggcaattttatcgcattgtatcaactgcggaaaaaaacagcaaaaccgatgtgttcgctgagaaaaaaggcgacaatcgccgcctttttagccagttatctaacgctttaaacggcttttactgcatcggcgatgcggtgtgcaaattcagtcacctgcgcttcgtcttcgccttccaccatcacgcgaattaacggttcggtgccggatttacgcagcaacacgcgtccacggttgcccagcgcagcttcaacctctgcggtcacggctttaacactctcatgctcaagtggatcgccgctacctgcggtgtaacgtacgttaaccagaatctgcgggaacattttcatgccgctgcaaaggtcgtgcaggctcatatggttacgtgccatcgccgccagcacctgcaagccagcaacgatgccgtcaccggtagtagttttatccagcaggatcacatgaccggaattctctgcaccgatacgccagcctttctcctgcattttttccagtacgtagcggtcacccactttcgcgcgcgcaaatggaattcctaactgtttcagcgccagttcaagccccatgttgctcatcaatgtacccacagcgccaccacgcagctggccctgacgaagaccttcacgcgcgatgatatacatgatctgatcgccatcgactttattgccttcatggtcaaccataatcacgcgatcgccatcgccgtcgaaggcaataccgagatccgctttttcagccagcacacgagcctggagcgcgcgaacgtcggtagcccccacttcggcattgatgtttacaccgtttggctcacaaccgatagcgataacgttcgcccccagttcgcgcagcacgttcggcgcgatgtgataagtcgcaccgtttgcacaatccaccacaatcttcagttcactgaggctaagttcgttcgggaacgtggctttgcaaaactcgatatagcgacccgcggcatcaacgatacggctggctttacccagttctgcgctatcaacgcagctgatctccttttccatttccgcttcgatggcctcttctaccgcatccggcagtttggtgccgtcgatagagaagaatttaatgccattatcgtagaacgggttatggcttgcagatatcacaattccggcctctgcgcggaaggtacgcgtcagataagccacggccggtgttggcatcgggccagtgaagagtgcggaaaggcccgctgccgccagacccgcttccagtgcactctccagcatatagccagaaatacgcgtgtctttaccaataataatcttacgggagccgtggcgcgccagcactttacccgcggcccaacccagcttaagcacaaaatcaggtgtgatcggcgcatcccctacacgaccacgaatcccatcggtaccgaaatatttacgattactcatagcgtttgttttcctttgcagacagagtggcttccaccacccgcatcgcttctacggtttctttgacgtcatgaacacgaatgatgtgcgcgccttgcattgcggcaatgaccgcacaggccagactaccgctcaggcgctcggacggccccacgttcagcagctgcccaatcatgctttttcgactcatacccaccaacagcggcaggttgaaatggtgaaattcagccaggcgcgccagtaaactatagttatgggagagatttttaccgaaaccgaatccggggtcgagcaacaatttctcttttgcgatacccgcctgctcgcaacgtgctatttgctcaataaagtagcgattcacttctgcaaagacatcgtcatacttcggagcttcctgcatggtttttggatttccctgcatatgcatcagacaaaccggtaaaccggtttctgcagccgcctccagagcgccaggttcggaaagggagcggatatcattaataatgtgagcgccaactttcgcactctcacggatgacttctggtttggatgtatcgacactgatccagacttcgaagcgttgagcaattgcctcaaccacaggaataacacgttgcaactcttcttcaacgctaacttccgccgcccctgggcgcgtggactcgccaccaacgtcaatgatcgtcgcgccagcgttgatcatcagattcgcatgtttcaccgcatctatcaggctgttatgcgtgccaccatcgctaaaggaatcaggcgtgacgttgaggatccccattacgtgaggatggctaaggtccagactagtaccctgggcaaagagtttcatgatgttatccctggtatgaattgataagaaaaaaccccggagcacgccccggggttttcggtacaaatacagtcatctgatgcgggaacttacttgtcgcctaactgctcactcatggtgttacccgggttcggcgtacgcggttcatcaaccggacgaggagcctttggactaccattgtcgccagaattgttagaagcgcctggttcttcccagcccgctggcggacgtacatcgcgacgtgccatcaggtcatcaatctgcggtgcgtcgatagtctcatatttcatgagagcatctttcatcgcatgcagaatatccatattgtcggtcagaagctgacgcgcacgattatagttacgctcaatcagtgctttcacttcctggtcgatgatacgtgcagtttcatcggacatatgtttcgctttcgctacgctacggccgaggaacacttcaccttcttcttccgcgtacagcagtggacccaatttctcagagaagccccactgagtcaccatgttacgtgccaggttggtcgcaactttaatatcgttggacgcaccggtagatacatgttccggcccgtagatgatctcttctgccagacgaccaccgtacagcgtagaaatctggctttccagtttctgacggctggcgctgattgcgtcgccctcaggcaagaagaaagtcacacccagcgcacgaccgcgtgggataatcgtcactttgtgcaccggatcgtgttccggcaccaggcgaccgataatcgcatgacccgcttcgtggtaagccgtgctttctttctgcgcttccgtcatcaccatggagcgacgttccgcacccatcatgattttgtctttcgctttctcgaactcaaccatgctcacaacgcgtttgttgccacgagcagcgaacagtgccgcttcgttcaccaggttcgccaggtcagcaccggagaaaccaggagtaccacgggcaatgattgccgcgtcgatatcgggtgccaatggtacgcgacgcatgtgaactttcaggatctgctcacgaccgcgaacatctggcaagccgaccacaacctgacggtcgaaacggccaggacgcagcagggccgggtcgagaacgtccggacggttagtcgcggcgataacgatgataccttcgttaccttcgaagccatccatctcaaccagcatctggttcagagtctgttcacgttcatcgtgaccaccgcccagaccagcgccacgctggcggcctacggcgtcgatttcatcgataaagatgatgcacggtgccgctttcttcgcctgttcgaacatgtcacgaacacgggatgcacccacaccgacgaacatttctacgaagtcagaaccggagatagtaaagaacggaactttcgcttcgcctgcaatcgctttcgccagcagcgttttaccggtacccggaggaccgaccatcaagacgcctttcgggatcttaccgccgagtttctggaagcggctcggctcgcgcagatactcaaccagttcagcaacttcttcttttgcttcgtcgcagcccgcaacgtcagcaaaggtcgttttgatctgatcttccgtcagcatgcgcgctttgctcttaccaaagctcatggcacctttgccaccgccgccctgcatttgacgcatgaagaagatccagacaccaatcagcaacagcatcgggaaccaggagatgaagatagaagccagcaggcttggttcttcaggcggttcaccgacaaccttgacgttcttggtcaacaggttatccagtaatttcggatcctgaaccggaatgtaagtggtataacggttactatctttcttggtaacgttgatttcacgtccgttgatacgcgcttcacgaacctggtcgttattgacctcttgtaggaaggtagagtaatccaccttacggccattagactcgctgggcccaaagctctggaatacactcatcagcacaacggcaatgaccagccagagtattaggtttttcgccatgtcactcaagggattaacctcttattacaactgtgttaaaaacagcgtcaggatactctatatccagcatctttcaaactttcgtctgaaatctcccggttagggtttacgcccggtcgctacaatatacacttcccggctacgtgcacgagaagagtccagcttacgaactttgaccttcgtaaacagggagcgaatttcccttagatactcatcgaaaccttcgccctggaacaccttcactacaaaactgccacctggcgctaatacatcacgacacatttctagcgccagttccaccagatacatggcacgggggatatccaccgccggtgttccgctcatgtttggtgccatatcggacatgacaacctggactttgctgtcgccaacgcgctccagcagtgctttcatcaccagttcatcacgaaaatcgccctgaagaaagtccacaccaacgataggatccataggtaaaagatcgcaagcgatgatgcggcctttgccgccaatttgggtgaccacatattgactccaaccacccggagcagcaccaaggtcgacaaccgtcattcccggtttaaagagtttgtcactttgctgtatttcatcaagtttaaaccaggcacgggaacgtaacccctttttctgtgcctgttgaacatatttatcgctaaagtgttcctgaagccagcggctggagctggcagaacgcttcttacctgtcatttaactttcccatggggataactcatcgtaaccaattgcgtaaatttttacgcgcctatttggtgatatatgggagatggcggtagaatgacccgttttcaatcccaacgtaagcaaaaaatacgatgaatctgagtactaaacaaaaacagcacctgaaaggtctggcacatccgctcaagccagttgttctgcttggcagtaatggtttgaccgaaggggtgctggccgagattgaacaagcgttagagcaccatgaactcatcaaggtgaaaatcgccaccgaagatcgcgaaactaaaaccttgatcgtggaagctatcgtgcgcgaaaccggcgcctgtaatgtacaggtcatcggtaaaacgctggtgctttatcgcccaactaaagaacgtaaaatcagcctgccacgctaagattatcctaaagttacacacatttgctgtgtaaaacgaggggttttccgcaggcaggagagcaaaatgccacgctctgttcgttgataaaaggccgcatagcggcctttttcctttctttacaatacatcaacatcttgagtattgggtaattcttacaggtattccaccttaattacttcaaattctacttcgccgcccggcgttttgatgaccacaacatcatcttcttctttgccgatcaggccacgagcaatagggctgtttacagaaatcaggttttgtttaaagtcagcttcgtcatcgccaacgatgcgataagtctgttcttcgtcagaatccagattcagcaccgttacggtagcaccaaaaataacgcgcccattgttgggcattttggtgacatcaatcacctgcgcgttgctcagcttggcttcgatgtctttaatacggccttcgcagaaaccctgctgttcacgagctgcgtggtattcggcgttttctttcaggtcgccatgctcacgcgcttccgcgatagcagcaatgatttcaggacggcgcacagatttcagaaaatccagctcttcgcgtaatttttcagcgccgcgtaaggtcatcggaatagcttgcatttgttatacctcttgaatattcctgatagggcaagtcttcacccaccccggctgttcggcctgcccggcataactccttaccgggaccagaagcaaaaaaataccgacccgggtacaagtcccaggtcagctacaattcacattttgatagtcattttaccctgaagttcccgaagggtcatcgtttactttatagggcgttgcgccgtagtatgacggctcgattccaggttgttagcgcgagattatgcgattttccagatttatcatcggattgaccagctgtatagcgttcagtgttcaggccgcaaatgttgatgagtacattactcaactccccgctggtgccaaccttgccctgatggtgcaaaaagtcggcgcgagcgcccccgctattgattaccacagtcagcagatggcgctgcctgccagtacccagaaagtgattactgcgctggcggcgttgattcaactcggccccgattttcgttttaccacgacgcttgaaaccaaaggcaatgtggaaaacggcgtacttaagggtgacttagtggcgcgatttggtgccgatccgacgttaaaacgtcaggatattcgcaatatggtcgcgactttgaaaaaatctggcgtcaaccaaatcgatggcaatgtgttgatagatacctccattttcgccagccacgataaagcccccggctggccatggaatgacatgacacaatgctttagcgctccgcctgccgccgccatagttgaccgcaactgtttctccgtcagcctctacagtgccccaaagcctggtgatatggcttttatacgcgtggcatcttattaccccgttacgatgttcagccaggtacgcaccctcccccgtggttctgccgaagcgcaatactgcgaactggatgtggtgccaggcgacctgaaccgctttacgctgacgggatgcctgccacaacgttctgagccgctcccgttggcttttgccgtgcaggatggagccagctatgccggtgcaattctgaaagatgagttaaaacaggcgggtatcacctggagcggaacactgctgcgccagactcaggttaacgaacctggaacggtagttgccagtaaacagagcgccccgctgcacgatctgcttaagattatgctgaaaaagagcgacaacatgatcgccgatacggttttccgcatgataggccatgcgcgcttcaatgtgcctggaacatggcgggccgggagcgacgccgtgcgtcagatcctgcgccagcaagccggtgtcgatattggaaacaccattattgccgatggtagtgggcttagccggcataacctgattgcccccgccaccatgatgcaggtgctgcaatacattgcccaacacgacaatgaacttaactttatctccatgctgccgctggcgggctatgacggctctttgcagtaccgtgcaggtctgcatcaggcgggcgtggatggaaaagtcagtgcgaaaaccggtagcttgcagggggtatataacctggcgggattcattaccacagcgagcgggcaacgaatggcgtttgtgcaatatctttctggctatgcagtagaacctgcggatcagcgtaatcgccgtattccgttagtgcgttttgaaagccgtttgtataaagatatttatcagaacaattaatcaaaaagaaaccccggcacatggccggggcttcagattattgacaaagtgcgctttgtttatgccggatgcggcgtaaacgccttatccggcctacaaaatcgtgcaaattcaacatattgcaattctcttgtaggcctgataagcgtagcgcatcaggctgatttggcgtttatcatcagtgattaacgcttgtaaatgaactcaacgccttcttcgtcgtcttcgtcccagtcgtcatcccagtcttcatcatcctcttcagcaatctcttcaagctgctggcgatgataatcatcccacatgaattcgactttctctggctgtttcgcttcttcagcctgcacgaccgggttttcaatgataaaggtcatcacatcccagcagagatctttcacgcccagtccactcgccgcagagatcagataatatttatcttcccagcccagcgcctcagcgatcgctttcgctttctcttcggcttctaccttatccagcagatcgatcttgttgaacactaaccaacgcggtttcgtcgccagatcctggctgtatttttccagctcgctgataataatacgcgcgttttcaaccggatcggtgccgtcaatcggatcgatatcgatgaggtgcaacaggacgcggcaacgttccaggtgcttcaggaagcgaatgcccagacctgcgccttccgcagcgccttcaatcagtcctggaatatcggcaacaacgaagctcttttcgttgtccattcgtaccacacccagacttggcaccagagtggtaaacggataatccgccactttcggtttagccgcgcttaccgcacgaataaaggtgcttttacccgcgtttggcatccccaacataccgacgtcagccagcagcatcagctccagcagcagctcgcgcttatcgcccggcgtgccgttggttttctgccgcggtgtacggttaacggagcttttgaaacgggtattgcccagaccgtgccagccgcccttagcaaccagcagacgctgaccgtgtttggtcatatcgcccatggtttcaccagtaccctggtcgattacacgcgtacctaccggcactttaatcgtcacgtctttaccgcgcttaccggtacagtcgcggcttgcgccattctgaccgcgctctgcacggaaagatttttcaaaacgataatcgataagcgtgttcaggttctcgtcggcttccatccatacgtcaccaccatcaccgccgtcgccgccatccgggccgcctttcggaatatacttttcgcggcggaagctcacgcaaccattaccgccatcacctgcaacgaccagaatgcttgcttcatcaacaaacttcattttattctccgtaaatcattcgcctgcgcggggttggcttaccaccgttgtatgcttacgtaatccgccccaaatacgatgaccaatggcggaatacatcgcgcccgcaaccacgacaaacgcaccgagataacctaaaaggtttaacatcggtctggcgaagaaatcgggccaggccagacttaaaagatcactaaaaaacagcgtaaacagtggggtgagcgtgatgatcgcgctcacctgcgctgcctgccagcgagccatcgcttccgccagggcgccatatcctaccaaggtattcagtccgcaaaaaattaaacatgcgagctgccagtggctaagctgcgctatcactccaggctttgccagagggaagagcgcaattgtacataaagtgtacagtaaaaacaggatctgcggactggccagccgacgcaataaaaccttttgcgccacgccataactcacccaaaccgtcgccgcaccgaccccaaagataactccccaggtgtaatcggtgagctttgtaaatatctcgaccagactggtgttaaaaaacatcaccaggccgctcaggagcatcaatgcccctacaacctgagtgctgcgcattttctctttgaggataaatacgctggcaaccatcatgccaactgggctgagttgcccaatcacctggctagcggtcggactcaggtattgcaaggaactgctgaacaggatgaagttcccaaacagcccggcggtcgccactgccaacaaaatcaaccagcgtggcttacgaaacacgcgtaatggcggcaacctcttcttcaccgcaagaatggcacccaggccaatactcgccatcaagaaacggtaaaacacgattgtcggaggttccatcacctccagcacctgcttcattgcgattggcaacgccccccagcaaattgctgtggtgagcgccaaaagaatgccaatgcctgcctgctgcttcataccgtattccctgcaaagcgcatttgcggattaacgtcgcaccatgcgcatttttaccggttatcgaatgtaaaaagccccgcaacgtgttgcggggctttcatccgttaccgggacgcgaaaaacttattcagcttcgatgctgataaatttacggtttttcgggcctttaacttcgaatttcactttaccgtctgctttagcaaacagagtgtggtcacgaccgcaacctacgttagcgccagcgtggaatttggtaccacgttgacgaacgatgatgctacccgccagaacggattcgccaccgaaacgcttaacgcccaggcgtttagcttcactatcgcgaccgttacgtgtggagccgccagcctttttatgtgccatttgaaatctctcctcaggtcttaggcgctgatgccagtaattttcacatcagtgaaccactgacgatggccctgctgcttacgatagtgtttacgacgacgaaacttaacgattttaactttctcgccacgaccgtgagcaacaacttcagctttgattacgccgccatcaacgaaaggaacgccgattttgacttcttcaccgtttgcgatcatcagcacttcagcgaactcaacagtttcgccagttgcgatgtccagcttttccaggcgaacggtctgaccttcgcttactcggtgttgtttaccaccactttggaaaaccgcgtacatataaaactccgcttccgcgcacaccttttcaatgattcagagtgcgctataaatattcacaatagggcgcgaatattacgcaaaacgcacgcctttgacaagtgctacagtcaatacacgaagaaaaaaaacacaacttgtacggtaacgtttatctgtgccattttttcagtacaatcaccctatattcctaaccataaaccctaagttgcctttgttcacagtaaggtaatcggggcgaaaagcccggcttttgcgatgaatttagaaaaaatcaatgagttaaccgcgcaagatatggcgggtgttaatgcggcaatccttgagcagcttaattccgacgtccaactgatcaatcagttaggctattacatcgtcagcggcggcggtaaacgtattcgtccgatgattgctgtactggctgcacgagctgttggctatgagggaaatgcgcatgtcaccattgctgccctgatcgagtttatccacacggcgactctgctacacgacgacgttgtggatgaaagtgatatgcgcaggggtaaagctaccgccaacgccgcatttggcaatgccgccagcgtgctggtaggcgattttatttatacccgcgctttccagatgatgaccagcctcggtagcctcaaagtgctggaagtcatgagtgaagccgtaaacgtcatcgcagaaggtgaagttctgcaactgatgaacgttaacgatccggacatcactgaagaaaactacatgcgcgttatctatagcaaaaccgcgcgtctgtttgaggctgccgcgcagtgttccgggattctggctggctgtacgccggaggaggagaaaggcctgcaggattatgggcgctatctcggcactgctttccagttgatcgacgatttactcgattacaatgccgatggcgaacagttaggtaaaaatgtcggcgacgatctgaacgaaggtaaaccgacgctgccgctgctgcatgcgatgcatcatggcacaccagaacaggcacagatgatccgtaccgccatcgaacagggtaacggtcgccatcttctggaaccggttctggaagcaatgaacgcttgtggatctcttgaatggacgcgtcagcgtgccgaggaagaagcagacaaagccatcgcagcgttacaggtgctcccggacaccccttggcgagaagcactcatcggcctcgcgcacatcgctgttcaacgcgatcgttaatcccctcccctcatcccgcgcagcgcgcgggatggttccagtaagttccataaaaacacttattcagctctataacacctgaaaaatagggatgtgcatctttatatattctgaatattcacactctttacaggaactttttagagcaataggccatcaggagtatagtgatgctcgacagaagaagtgttctgaatgaaagcgactaacttaaggagtgaggaaaaatggaaagtaatttcattgactggcatcccgctgacatcattgcgggtttgcgcaagaagggaacgagtatggcggcggaatctcgcagaaatggtttgagttccagtacgctggcgaatgcattaagccgcccatggccgaaaggagagatgattattgcgaaagccctgggaactgacccctgggttatctggccaagtcgctaccatgatccgcagacccatgagtttatcgacagaacgcagttgatgcgtagctacactaaaccgaaaaaatgagtggtctggcggtagccccgcgaacggggctgccagctctcagacgattattcgcctttcacacgctcaatatttgcacctaaagcgcgcagtttgtcttcaatgcgttcgtagccacgatcgatgtgataaatacgatcaaccaccgtcgtcccttccgcaatacagccagccagcaccaggcttgcacttgcacgcagatcggttgccataacctgtgcgccagaaagtttttcaacaccgtgacaaataacggtattgctttcgatttcggcgtgcgcgcccatacggctcagctctggcacatgcataaagcggttttcaaagaccgtttcggtgataaacccggtcccttctgccaccaggttcaacagcgtgaactgggcctgcatatcggtcgggaatgccggatgcggcgcggtacgtacgttaacagccttcggacgtttgccatgcatatccaggctaatccagtcttcgccgacttcgatgtccgctccagcgtcacgcagtttcgccagcacggcgtcgagagtatctggctgcgcgttacggcagataattttgccgcgagaaatcgccgccgccaccaggaaagtaccggtttcgatacgatccggcagaacgcgatagacaccgccgcctaaacgttccacaccttcgatgacgatacgatcggtgccctgaccgctaattttcgcacccagcgtaatcaggaagttcgcggtatcgacgatttccggttcacgcgctgcgttttcaataatcgtggtgccttccgccagggttgcagcacacatgatggtcaccgttgcgccaacgctgactttatccatcacgatatgtgcacctttcaaacgaccatcgacggaagctttaacgtaaccttcttccagtttgatggtcgcgcctaattgttcgaggccagaaatgtgtagatcaaccggacgcgcaccgatcgtacaaccgccaggtagactaacttgcccctgaccaaagcgcgctaccagcggccccagcgcccagatagaagcacgcatggttttaaccagatcgtaaggtgcgcagaatacattaacgtcgcgggcatcaatatgcacagaaccattacgttctactttcgcacccagctggcttagcagcttcatacttgtatcgacgtctttcagtttcgggacgttctggatctctaccggttcttccgccagtagtgcggcaaaaaggataggcagagcagcatttttagcgccggaaattgtgacttcgccctggagcttcgttggcccctgaacacgaaatttatccatttagtttgttctcagttaacaattcatatccgctaccggcgaatcgcccatagctcaaaagccgttcagtttgcgatcgcgcgcccactccgcaggggtatacgctttgatgctcacagcatgaatgcggttatccgcaatatattccatcagcggaccatagaccgtctgctgttttttaacccgactcatgccgtcaaacaactcacccacggcaataacctgaaagtggctgccatcgccggaaacgtggacttcctggagggagagagcgttcatcaacacgctctgaatttcattattttccatgggatcttcaatcatcagttaataaaccagcgaaacatcttagagcaaagttgcgctggcataaataagcaaaaagcctcgctgataaatcagacaaggctcgacttgcaggcaggtttgccggacaggcggttaacgccatatccggcctgaaaaaatttaacgaggcagaacatcagcaggcaaattatacaatttcgccagggtatacactttgtcgtttaccccctgaagcgtcacattgttgccctgctttttcgccagatcgataagatggagcagcagtgccagtccccccgtatccacgcgggagacacggctaagatcgatgcaggtaatccccttcaccgcttcctcacgcatttcccaaagcggtagcaaaacgtcctgatccagctctccggataacgccagcgtgtcacccgtctgcatccagctcagactctcgctcattattttttctcttccagagtgattttctgttgagaaatgcttttcagttgcgcagtcaggccgtcgatacctttggtacgcagcagcgttccccactcgttttgtttggtggtgatcatactgacgccttcagcaatcatgtcgtaagcctgccaattgcccgtctgggagtttttacgccactggaagtccagacgcaccggcggacggccattcgggtcaataatggtaacgcgaataggcacaatggttttatcgcccagcggctgttctggcgcaatctgataggtttgaccgtgatacatcgccagcgcctgaccgtaagcctgcttcaggtactcacggaaagcggcaaagtaggcttcacgttgagcaggggtcgcactcttgtaatactggcccagcaccagcgcaccggcgtatttcacctgtacgtatggcagcagttcctgatcaacaatggtacgcagataatccgggttggcccgaatttgcggttgctcattcttcaggcgatcgaacgttttctgcgccgcctcgtccatcagcttatacggattggtctggtctgccgcggttgccgcactcagaggtgcaatcaccagcaaagcgaccatcattaaacgtttaaacatgcgtcggttctcctgaaattatttcgttgtacccacaggttcagtggtttcattattacctggcgcagcagctggcgcatcgccactattcttattgtcatcgcctttactaccgtaaaggaactgaccaatgagatcttccagcaccatcgcagacttagtgtcctgaattgtatcgccatccttcaggatagcagtccccagttccgggtcttcaaaaccgacgtttaatgccagatattgttcccccagcaggccggaagtacgaatgctcaggctactggtatctggaatgtggttataacgttgttcaatttccagcgttacgcgcggcagataggttttcgggtccagcgtaatatccgccacccgacccacaacaacgccaccaatactgaccggagagcgcgctttcaggccgccaatgttatcgaacgtcgcataaagcgtgtaggtcggttcagtacgtatggacgtcacgttcgccgccttcaggcaaacaaacagcgccgccagcagtgctgctaataaaaagatacccacccaaatttcattttttttcgtttgcatgaactcaattcccaaacatcaatgcggtcagcacaaaatccagccccagaacagccagagagctgtggacaacggtgcgagtggttgcccggctaatcccggcagacgtcgggatggcgtcgtagccgttaaacaagctaatccacgtcaccgtgatggcgaacaccacgctcttaatcagacagttgaccagatccatacgccagtcgacggcattttgcattgcgctccagaagaacccgctatcaatgcctttccaactgacgccgaccagagatccgccccagatccccacggcgacgaaaataaccgtcaacagtggtaaactaataaccccagcccagaaacggggagaaataacccgacgcagcggatccaccgccatcatctccatactggagagttgctctgtagcgcgcatcaggccgatttctgcggttagcgcgctaccagcacgcccggcaaacaacaacgcggcaaccaccggccccagttcacgcagtaggcttaacgccaccagcatacccagactggtttccgcactataagtggtcagaaccagataaccttgcagccccaacaccattccgatgaacacgccagaaaccacaataatcagcatgctcaggacgccgacattatagagctggcgcaccagcagcggcgcatgtttgcgaaattccggtttgccgaccagcgcattgaataacattaacccggcccgcccgaacgttctcagggttttaatccctttatgtccgaggctcgccagcgcatttaacagcatgagtggcttaactccctggtaaaagatcagcgtgataatcgccggcaggatagcggaacggaacaggcccgtcagctatcccgtccagaaactgacgtacgcgcggatcaggattcgcctgcaacgcctgggcactgccatgagcgacaatttttttgtccgccaggatccaggcgtgatccgcaatacttaacacttccggcacatcgtgagaaaccaccacacaagtcacgcccagcgcgctgttcagctcagaaatcagcttcaccagtacgcccatggtgatgggatcttgcccaacaaaaggttcatcaaacatgatgagatccggctccagcgcaatcgcacgcgccagcgctgcacgccgcgccatcccaccggaaagttcagaaggcattagtttagccgctccacgcagccccacggcctccagcttcatcatcaccgtactatgcaacaatggcgcgggaagttgggtatgttcgcgcagtggataggcgacgttgtcaaatacgttcatatcagtgaacaacgccccggactgaaataacatgctcatccgtttgcgcactgtatacaggcggctacgagacatcgccggaatattctcaccatcgaaaaggatctcaccatgatctggtgcgatttgcccgccaatcagacggagtagcgtcgttttaccgatgccgcttggccccatgatcgccgtgatcttccctcgcggcacggtcagggaaatattatcgaagatgcagcgattgccacgcgtaaaactgacatcgcgcatatcgactaaattcgccacagactgctccataattcacccttcgtcttgcgttgattttctaagcatggcgctcaatttaaccttgaacccaacatatttacagaatattacccgccgtggttagcgaaagctggcatttgttttactttttagccgcataaagtcaaaattaagcatccgttacggctttctgaaaatcttcagcggaccggcgagtatacctgaagaaaggacgttagatgcttttagctacggcactgttaattgttggtttacttttggtcgtttacagtgccgaccgcctggtttttgccgcgtctattctttgccgaacctttggcatcccgccgctgatcatcggcatgacggtggtcagtattggtacaagcttaccagaagtcatcgtcagccttgccgcgtctctgcacgaacaacgcgatttagccgttggtacagccctcggcagtaacattatcaatatattgctgatcctcggtctggctgcgctggttcgtccttttaccgtccattctgatgttctacgccgtgaattacccttaatgttgttggtcagcgtggtggccggttccgtactctatgacggacaacttagtcgcagcgatggtatctttctcctctttctggctgtgctatggctgctgttcattgttaaacttgcacgtcaggctgaacgtcaggggactgacagcctgaccagagagcagcttgcagagctgccgcgtgacggcggattgcccgtcgcgtttttatggctcggcattgcgcttatcatcatgccagtggccacgcggatggtggttgataacgccacggtgctggcgaattactttgccatcagcgagttgacgatgggtctgacggcaattgctatcggaaccagcctgccggaactggcaaccgcaatagcgggggttcgcaaaggtgaaaacgacattgctgtcggaaatatcattggcgcaaacatttttaatattgtcatcgtgttgggtttacccgcgctgataacgccaggagagattgatccactggcgtacagtcgtgactacagcgtgatgttgctggtgagcattatttttgcgttgctgtgctggcggcgctccccgcaaccgggccgtggtgtaggggtattattaactggcggatttatcgtatggctggcgatgttgtactggttaagcccaatactcgttgaataactggaaacgcattatgagccacgtagagttacaaccgggttttgactttcagcaagcaggtaaagaagtcctggcgattgaacgtgaatgcctggcggagcttgatcaatacatcaatcagaatttcacgcttgcctgtgaaaagatgttctggtgtaaagggaaagttgtcgtcatggggatgggaaaaagcgggcatattgggcgaaaaatggcggcaacgtttgccagcaccggtacacctagttttttcgtccatcctggtgaagccgcgcatggtgatttaggcatggttaccccacaggatgtggtgattgctatctctaactctggtgaatccagcgaaatcacggccttaattccagtgcttaagcgtcttcacgtaccgttaatctgcatcaccggtcgcccggagagcagcatggcgcgcgccgcagatgtgcatctgtgtgttaaagtagcgaaagaagcctgtccgttagggctggcaccgaccagcagcaccaccgccacgctggttatgggcgatgccctcgctgtcgcgctgttaaaagcacgcggctttactgctgaagattttgcgctcagtcacccaggcggcgcactgggtcgtaaacttctgctgcgcgtaaacgatattatgcatacgggcgatgagatcccgcatgttaagaaaacggccagtctgcgtgacgcgttgctggaagttacccgcaaaaatcttggtatgactgtcatttgcgatgacaatatgatgattgaaggcatctttaccgacggtgatttacgccgtgtcttcgatatgggcgtggatgttcgtcagttaagtattgccgatgtgatgacgccggggggaatacgtgtgcgccctggcattctggccgttgaggcactgaacttaatgcagtcccgccatatcacctccgtgatggttgccgatggcgaccatttactcggtgtgttacatatgcatgatttactgcgtgcaggcgtagtgtaaagattcaaggataaacaacaatgagcaaagcaggtgcgagccttgcgacctgttacggccctgtcagcgccgacgttatagcaaaagcagagaacattcgtctgctgatcctcgatgtcgatggcgtactgagtgatggcctgatttatatgggcaataatggcgaagagctgaaagcgttcaatgttcgtgacggttatggcattcgttgtgcgctcacctctgatattgaagtcgctatcattaccgggcgaaaggctaaactggtagaagatcgttgtgccacattggggatcactcacttgtatcaggggcagagtaacaaactgatcgcctttagcgatctgctggaaaaactggcgattgccccggaaaatgtggcttatgtcggcgatgatctcatcgactggccggtaatggaaaaagtgggtttaagcgtcgccgtggccgatgcgcatccactgttgatcccgcgcgccgattacgtgacgcgcattgctggcggtcgtggcgcagtgcgcgaagtttgcgacttattactcctggcgcagggcaaactggatgaagccaaagggcaaagcatatgagtaaagccagacgttgggttatcattgtgctaagtctggcggttctggtgatgatcggcattaatatggccgaaaaagacgataccgcccaggtggtcgtcaacaacaatgatcccacctataaaagcgagcatacggacacgctcgtctataacccagaaggggcactaagctatcgattgattgctcaacacgttgaatattattccgatcaggccgttagctggtttacgcagccggtacttaccacgtttgataaggataaaatcccgacatggtccgtaaaagcagataaagccaagctgaccaatgaccggatgctctatttatatggacacgttgaagtcaacgcacttgtgccagactctcaacttcgcagaatcacgacggataacgcgcagatcaatctggtgacgcaggatgttacctctgaagacctcgtcacgttatacggaacaacatttaactccagcggtctgaaaatgcgcggcaacttacgcagcaagaacgccgagctgattgaaaaggttagaacatcctatgaaattcaaaacaaacaaactcagccttaatcttgtgcttgccagcagtcttctggccgccagcattccggcatttgccgtaaccggagacactgatcagccgatccacattgaaagcgaccagcaatctcttgatatgcaaggcaacgtggttacctttaccggtaatgtcatcgtcacccagggcaccatcaaaattaatgccgacaaagtggtcgttacccgtccgggcggcgaacaaggtaaagaagtgattgacggctacggtaaaccggcaacgttctaccagatgcaggacaacggtaaacccgttgaaggtcacgcttcccagatgcactacgaactggcaaaagattttgtcgttctgacgggtaatgcttatctgcagcaggtcgatagcaacattaagggcgataagatcacttacctggtgaaagagcagaaaatgcaggctttcagcgacaaaggcaagcgcgtaacaaccgttctggtgccgagccagctgcaggacaaaaacaacaaaggccagaccccggcacagaagaagggtaattaattcgttatggcaacattaactgcaaagaaccttgcaaaagcctataaaggccgtcgcgtggtagaagacgtcagcctgaccgtcaactccggggaaattgtcggtctgctggggccaaacggtgccggtaagaccaccactttctacatggttgtaggcattgtgccgcgcgatgcgggcaacatcattattgatgatgacgatatcagtctgctgcctctgcatgcacgcgcgcgccgcggtatcggctatctgccacaggaagcctccattttccgtcgcctcagcgtttacgataacctgatggcggtactgcaaattcgtgacgacttgtctgctgaacaacgtgaagaccgcgcgaacgagctgatggaagagtttcacattgagcacctgcgtgacagcatggggcagagtctctccgggggtgaacgtcgccgtgtagaaattgcccgcgcactggctgcgaatccgaaatttattctgctcgacgaaccgtttgccggggttgacccgatcagcgttatcgacattaaacgcatcattgagcacctgcgcgacagcggcctgggcgtgctgatcactgaccacaacgtgcgtgaaacactggcggtttgtgaacgcgcttatatcgtcagtcaggggcatttgatcgcccacggcacgcctacagaaatcttacaagacgaacacgttaagcgtgtataccttggggaagacttcagactctgatagggtagaagtttgcgacgttttagcaggagagtacgattctgaacatgaagcaaggtttgcaactcaggcttagccaacaactggcgatgacgccacagctccaacaggcaattcgtctgttgcagttgagcacgctggaacttcagcaggagctacagcaggcgctggagagtaatccgctgcttgagcaaatcgacactcatgaagaaatcgacacccgcgaaacgcaagacagtgaaacgctggacaccgccgacgcgctcgaacaaaaagagatgccggaagagctgccgctcgatgccagttgggacaccatttacaccgctggtacaccatccggcaccagcggtgactacattgacgacgagctgccggtctaccagggcgaaacgacgcagaccttgcaggattacctgatgtggcaggttgagctgacaccgttttccgacactgaccgcgctattgctacctctatcgtcgatgccgttgatgaaaccggttatctgactgtcccgctggaagatattctcgaaagtataggcgatgaagagatcgacatcgacgaagttgaagccgtccttaagcggatccaacggtttgatccggtcggtgtggcggcaaaagatctgcgtgactgtctgctgatccaactctcccaattcgataagaccacgccgtggctggaagaggccagactgatcattagcgatcatctcgatctgttagccaatcacgacttccgcactttaatgcgcgtcacgcgtctgaaagaagatgtgctgaaagaagccgtcaatctgatccagagcctcgatccgcgccccgggcagagcatccagactggcgaacctgagtatgtcattccagatgtgctggtgcgtaagcataacggtcactggacggtagaactcaacagtgacagcattccgcgtctgcaaatcaaccagcactacgccagcatgtgcaataacgcgcgcaacgatggtgacagccagtttatccgcagcaatctgcaggatgccaaatggttgatcaagagtctggaaagccgtaacgatacgctactgcgcgtgagtcgctgtatcgttgaacagcagcaagccttctttgagcaaggtgaagaatatatgaaaccgatggtactggccgatatcgcccaggctgtcgaaatgcatgaaagcacgatatctcgcgtgaccacgcaaaaatacctgcatagtccacgaggcatttttgaactgaagtatttcttttccagtcacgtcaataccgagggcggcggcgaagcttcctccacggcgattcgtgcgctggtgaagaaattaatcgcggcggaaaacccagcgaaaccgttgagcgacagcaagttaacctctttgctgagcgaacaaggtatcatggtggcacgccgcactgttgcgaagtaccgagagtctttatccattccgccgagtaaccagcgtaaacaactcgtttgacccaaccgataaggaagacactatgcagctcaacattaccggaaataacgtcgagatcaccgaggcactgcgcgaatttgttacagccaaatttgccaaacttgagcaatattttgaccgaatcaaccaggtctatgttgttctgaaagtggagaaagtcacccacaccagtgatgcaacactgcatgtaaacggtggtgaaattcatgccagcgcggaaggtcaggacatgtacgctgccattgatggcttaattgataagctggcacgccagttgaccaaacataaagataaactgaaacaacactaattgtccgggcaattagcatgtgcatggcggtctgttgtgcggcacaacgggccatttgtacggttaatgctccgagcctgttccactgtttgagtgggcaggttcttaggtgaaattatgacaaataatgatacaactctacagcttagcagtgttcttaacagggaatgtacgcgaagccgcgtccactgtcagagcaaaaaacgcgccctggaaatcatcagcgagctggcggcgaaacaacttagcctgccgcctcaggtggtttttgaagctatcctgacgcgggaaaaaatgggcagtaccggtatcggcaatggtattgccattccgcatggcaaactggaagaagatactctgcgcgccgttggcgttttcgttcagctcgaaacgcctatagctttcgatgccatcgacaaccaaccggtggacttactttttgccctgctggtgccggcagaccaaactaaaacgcacctgcatactctgagcctggtggcgaaacgtctggcggacaaaaccatctgccgccgtttacgcgcagcccagagcgatgaagagctgtatcaaatcattacggataccgaaggtactccggatgaagcgtaattattcggtaatgtctcttttagacgttgtgaggagaaacagtacatggtactgatgatcgtcagcggacgtagtggtagtggtaaatctgtcgccctgcgtgcgctggaagatatgggtttttactgcgtggataaccttcccgtagtgttgttacccgatctggctcgaaccctggccgatcgcgagatttctgccgccgtcagcattgatgttcgtaatatgccggagagtccagaaatattcgaacaggcgatgagtaacctgcctgacgctttcagtccgcaactcctgttcctggatgccgaccgtaataccttaattcgtcgttacagtgacacgcgccgactgcatccgctttccagcaaaaacctgagcctggaaagtgctatcgacaaagaaagcgatttgctggagcctctgcgtagccgagcggatctgattgtcgataccagtgaaatgtccgttcacgagctggctgaaatgctgcgtacccgtctgctgggtaaacgtgaacgcgaactgaccatggtctttgagtctttcggcttcaaacacggtatccctatcgatgcagattacgtctttgacgtgcgcttcttgccgaacccgcactgggatccgaaactgcgtccaatgacaggtcttgataaacctgtcgccgcgttcctcgaccgccacacagaagtacacaattttatctaccagacgcgaagctatcttgagctatggttacctatgctggaaaccaacaaccgtagctacttgacggtcgccattggttgtaccggcgggaagcaccgtagcgtgtatattgcagagcaactggcagactacttccgcagccgcggtaaaaacgtccagagtcgccatcgtacgctggaaaaacgtaaaccatgaccgtcaagcaaactgttgaaatcacaaacaagctgggcatgcatgcccggcctgcaatgaagctgtttgaattaatgcagggttttgacgctgaagtgctcttacgtaatgacgaaggcaccgaggctgaagccaacagcgttattgcgctgctgatgttggattctgccaaaggacggcagattgaagttgaagcgaccggtccacaggaagaggaagcactggccgccgttatcgccctctttaattctggttttgatgaagattaatcttcatcactttgacatacaactcccttcaaactccccccgacaataagaaaatcacgtactgaaatcgttctcaatcaacgtcatttgtacattttgtgcgcttttcactttcagaagaaccttaagaaaaccttaagaggcattgtttaggttttgtttaagttaatcgaccatactggagatcgtcagaaaatatttccaggagatggcatgattcgcttatctgaacaaagtcccctgggcaccggaagacatcggaaatgttatgcgcatccggaagatgcccaacgctgtatcaagattgtctaccatcgtggcgatggtggcgataaagagatccgccgtgagttaaagtactacgcgcatcttggtcgccggttaaaagactggagtggaataccgcgctatcacggtaccgttgagacggattgcggaaccggttatgtctacgatgtgattgcagattttgacggcaagccttccattacgctgaccgaatttgctgaacaatgccgttacgaagaagacattgcacaactgcgccagctactgaaacagctgaagcgttatttgcaggataaccgtatcgtgacgatgagcctgaagccgcagaatatcctctgtcaccgcatcagtgagagtgaggttatcccggtcgtctgcgacaacattggtgaaagcacattgattccactggcgacctggagcaagtggtgttgtctgcgtaagcaagagcggttatggaaacgatttatcgcccaaccggcgctggctattgccctgcagaaagatctgcaacctcgtgagagcaaaacgctggccctcactagccgcgaagcttaatccagctggtgttgttgcataaacggctcaccgcctaactgatacatctgccgtaaaatccacgcctgacggctacgcacgtagccgcttgggctggagactttgaaacgaagtggattaggtaatacagctgccagtaatgcagcttcgctccgggtaagtttgctcgcgggtttgtggaaataacgttgtgccgcagcttcgacgccaaacacaccgtcgccaaattcggcgatattcaggtaaaccgtcaggatacgctttttgctccagaccgtttctatccccagcgttaatccggcttccagcccttttcgaacccagctacgcccatcccataaaaagagatttttggctgtctgttgagaaatcgtactagcaccgcgaatacggttttcattgcgctcgttgtgcgccagggctttctcaatggaagcgacatcaaagccccagtgctcaggaaatttctgatcttctgcggcaatcaccgccagtcccatccacgggctgatttgatccatactgacccagtcagaatgtgccacgtaacgaaaattgccatgcagccaggcgctgacctgtcgctcgaccattaccgcactgaagggaacaggcgcaacgctaaacaacgcgatgcccccgccccagaaaacggcgaggacaaccattaaccgcaaaagaaaacggcgaacgaaactaaacaccgttaagcggcttttactcattcagccagaaccagcacgcgggaaaccagcttatcaatgccgctcgccgcttctgcaatgttctgcgccagcatatatgctggggtggtgacaatcttattgtcttcatcaaccacgatatcatcgacaggacacggcacatgctccgcgcccatctcttccagcacttctgcggtatcgatatcagtaccgatggtcaaacgcagcgggaaatcgaaaattttcggcagcatcgccggggcaatacacataaaaccaagcggttttccggcctgatgcatcgcttgtgccagcgcctttaattcacggtcaacggtgcattcgctaccaagactggcaaaattgcttaaattcttcgccgcgccaaacccccccggcacaatcaacgcatccagttcagcggcatcggcctgggccagaggacggatttcaccgcgcgttattcgtgccgcttcaatcagcacattgcgcgtttccgtcatcgcttcgccagttaaatggttgataacatcaacctgctgcttatccggtgcaaagcagaccgcctgcgcaccgctgcgactaatagctaacaacgtcaacaccgcttcatgaatttcagaaccgtcatagacgccgcatccgctcagaattacgccaattttcttcattgtgatcatcctttcgcaattgactgaaacacattaatttttttaataaaaatggtacgcatcacacatttaactgattcatgtaacaaatcatttaagttttgctatcttaactgcgtgcggcctgaaaaacagtgctgtgcccttgtaactcatcataataatttacggcgcagccaagatttccctggtgttggcgcagtattcgcgcaccccggtctagccggggtcattttttagtggcttttgccacccacgctttcagcacttctacgtcgtgacgccactcttctttcatctcttcaatccattcaccgacgttatcttcccaggccggaaggtcaggagactgaatttgctgacccagctgttgcagatggcgtaaccccacactccccgccgcacctttaattttatgtccttcctcaacaatgccttttttatcctgcgccgtcagattgctctccagcacgctgacatagcccggcatcatcttctcaaacaccgctaacccgtcggtgatcagcttcggtcctacaagttcgagatactgttccagcatgggaatatcgagcaatgcttcacttttactgttctcttctgtcgtcaccgtactctcctcatcatcctgggtatcccagaatttcttgatcatcgcggttagcgccggaacagaaagcggcttactcagcacatcatccattccagcattgaggtactcttgtttgtctttcagcacgttagcggttaaggccaccagcggcggtaaatcctcgcgcggataacgtttcgtcagttcacgagagatatccagcccggtcatatctggcaactgaatatccagcaacaccaggtcgtattcgcccggtttaaacatctccagcgccgccttgccggtcatggcgacatcaacgctgttacctaatttttccagcacagaacgcgcaacaatcacgttcagttcaatgtcttccaccagcagcacattcagcgccggtaaaggcatatcgtcttcatcaaacgcatcatcgacctcttctgctacgctcggtgcgtggatcgtcaacgtaaaggtactacctttgccctgttcgctggtaaccgtaatatcgccgcccatatttttcgccagacgacgagaaacggccagaccaataccggtgccggtggcaggtttaccgccatgactgtctttcacctggtaatacatggcgaaaattttatccagctcatcctgcggaatgccgataccagagtcttccacttcaaaatgcagcatatcgccttcatcgtagcgcacgcgcacggtaacctggccttgctgggtgaatttgacggcgttactgatgaggttccacaggatctgccgtaaacgcgtcccgtcggtaatgacctgatgcggtaatggcagcgtcggctccaggttaaagcgcaatcctttttgttgcgcctgcaatgcggagagattttccagatcggcaaggaagctggtgaaatcaaccggttgattatcaagctggaccttgcgccgttccatcttatccatgtcgataatatcgttaaagatattccccagcgtgacggcgctaacatggatggtcttgagatatttttcctgctcggcggtgagttcggtatccagcagaatgcggctcagaccgacgataccgttcagcggtgtacgcaattcgtgactgatggtggagataaacgtcgttttgtcgcggctggcccgttcaagcgcatcctgataccgcttacgctcggtaatgtcgcgaccaaagcccatcaaaccgtgacgtttacccacgcggtcgtagtacggcactttacggatttcaaagcaggctttgcgcccgtccgggtaatccagccactgttcataggtcagactcacattatgacggaacactttttcatcggtttcaatgacttttgcggcggcttccggactgtaaacatcagcaggtttcaggtgaaccagttgtttttcgctttttccggtcagcagctccatcgcgcggttacagccggaaaactctttatcttcgttacgataaaaaaccaggtcgggactagcatcaaggaaggaacgtaagaaactggattgctgctcgagctgaatttgtgtctcttcgcgctctttgatttcaattttcagttggccgaaggtttcctgcagttctgcttccgctttttcacgaacggcaatttcctgatttagctgggcaatattatcttttaactgaacgttgaggctcaaatcgcgctcgcgcatctcctccagtttttgcaccagccgactcagacgttgtcgactctcctccagttgctcgacgaccacgcttagaaagtagaccgcccacggcgtaatcagcaaaccaaagaagatagaacgaataacatcaatgctttcgacctgaccatgcagcaccatggttaccgccatttgtaccacaatggcaagaacgacgagggccagcgccagcaacatactgaagcgcaccagacctaacttcatcatcaggtcaacataatactgcgccagcagacgaatttgcttcattagggaattccttcacgacaacctgccccaataatacccaattctgacagttacgttataaattgtgtgagaaatgcggaattcccctcaacgacttactccgttggaggtagccacggacgtcccagcgcgcttccctgtacgccatgttcattcagatagcgatccagctcgaccattcccgtccatcgattttcgcaccacagcggagcaagcagcgtcgggcgacgggcgctggcggaaatgcggtggtagatcacttccggtggcgtatggcgaatcatttctccggcagtgagcgtgtaatcctccagttcaataccgttcaaacgccccgcttcccaggctttcgccataatgctgcctttcacaatatgcagcggatgcagctttatgccgtccacgccggtttcaaccactcgctccagcgtttgcaaacattcagcctgcccttcgccaggcaggccgacaattaagtgggaacacaccttcagcccgcgctgacgtgccagctgggttgtacgctgataacaggcaaaatcatggccgcggttgatgcgatgcagtgttttgtcgtgggcggtttgtagccccagctccagccacacttcgtaaccctggtccttatattcgcaaagcagatccagcaccgcatccggcacgcagtccgggcgggtacccacacacaaaccgacaatattggcctggctcaccgcctgctgatacatagaacgcagcacctgaacttccgcaaaggtgctggtatacgcctgaaagtaggccagatagcgtttagcgcggttaactaaattcgcctggtgcgccagttgctcggcaatggaacgatgctgctgcgcttcatcggcaaagctggcaacattacagaatgtgcagccaccacgcccgatggtaccgtcacggttagggcagctaaaaccgccgtgcagcgtcagcttatgcaccttttgcccataacgacgggtgagatcaccaccaaacatattgactaatttctgtaactgcataatctgatagaccgcgccttgaaaagaggccaaagcctgccatttttagctcaattcggcgatgacctggatcaatcgtcccggcctgcttttatcaactgcataatcaatcaaaattaccgaaatttcatgcataatcacataaatcacttttgcttatcttgtgtcagatttttttatctcctgatggattttaggcaaaaacagtagcatgaaacgtcattaccaattaaggcagtataaaatgctggttttgtcgtcagttcaaggcaggataagggttaacacacctttatgacagtcaggaattgactgtttctctaacgacttcccttttagccttaaagataaaatccattttaatttcagtcatttaataaagaattttgcgctaaagcacatttctgtaccaataagcttgccatttgacctgtatcagctttcccgataagttggaaatccgctggaagctttctggatgagcagcctgctcatcatatttatgcagtaattgagatcccctcttcaccgtattaaccgatgcgaaaaggacaacaagggggcgaatgcgaggcgcgcgtatgacacgcaaaccccgtcgccacgctctttctgtgcccgtgcgcagcggtagcgaagtggggttcccgcagagcctgggggaggttcacgatatgttgtacgataaatcccttgagagggataactgtggtttcggcctgatcgcccacatagaaggcgaacctagccacaaggtagtgcgtactgcaatacacgcactggcccgcatgcagcaccgtggcgcgattctcgccgatggtaaaaccggcgacggttgcggcttgctgttacaaaaaccggatcgcttttttcgcatcgttgcgcaggagcgcggctggcgtttagcaaaaaactacgctgtcgggatgctcttcctgaataaagatcctgaactcgccgctgccgcacgccgcatcgttgaagaagaactgcaacgcgaaaccttgagcattgtgggctggcgtgatgtccccactaacgaaggcgtgctgggtgaaatcgccctctcctctctgccacgcattgagcaaatttttgtgaacgccccggcaggctggcgtccacgcgatatggagcgccgtctgtttatcgcccgccgccgcattgaaaagcgtctcgaagccgacaaagacttctacgtctgtagcctgagcaatctggtgaacatctataaaggtctgtgtatgccgacggatctgccgcgcttttatctggatcttgcggacctgcgtctggaaagcgccatttgcctgttccaccagcgcttctccactaacaccgtaccgcgctggccgctggcgcaaccgttccgctatctggcgcataacggtgaaatcaacaccatcaccggtaaccgccaatgggcgcgtgcgcgtacttataaattccagacaccgcttatccctgacctgcacgacgccgcaccgttcgtcaacgaaaccggctctgactccagtagcatggataacatgctggaactgctgctggcaggcgggatggatatcatccgcgccatgcgtctattagtaccacccgcctggcagaacaacccggatatggacccggaactgcgtgccttctttgactttaactccatgcatatggagccgtgggatggcccggcgggcatcgtgatgtccgacggtcgttttgccgcctgtaacctcgaccgtaacggtctgcgtccggcgcgctacgtcatcaccaaagataagctcatcacctgcgcctctgaagtcggtatctgggattaccagcctgacgaagtggtcgaaaaaggccgcgtcgggccaggcgaactgatggttatcgacacccgcagtgggcgtattctgcacagcgcagaaaccgatgacgatctgaaaagccgccatccatataaagagtggatggagaaaaacgtccgccgactggtaccgtttgaagatctgcccgatgaagaagtgggtagccgcgaactggacgacgacacgcttgccagctaccagaaacagtttaactacagcgcggaagagctggactccgtaattcgcgtactgggcgaaaacggtcaggaagcggtcggtagcatgggcgatgataccccattcgccgtgctctccagtcagccgcgcattatttacgactacttccgccagcagtttgcccaggtgactaacccgccaatcgacccgctgcgtgaagcgcatgttatgagcctcgccaccagtatcggtcgtgaaatgaacgtcttttgcgaagcagagggccaggcgcaccgtttaagctttaaaagcccgattctgctctactccgatttcaaacagctcacgacgatgaaagaggagcactaccgcgcagatacgctggatatcacctttgacgtcactaaaaccacgctcgaagcgacagtcaaagagctgtgcgacaaagccgaaaaaatggtacgtagcggcaccgtgctgctggtgctctccgaccggaatatcgctaaagatcgcctgccggttccagccccgatggcggttggcgcgatccagacccgtctggtcgatcaaagcctgcgttgcgatgccaacatcatcgtcgaaaccgccagcgcccgcgatccgcaccacttcgccgtgttgctgggcttcggcgcgacggctatttatccataccttgcctatgaaacgctgggccgcctggtagacacccatgcgattgccaaagattatcgtaccgtgatgctcaactaccgtaacggcatcaacaaaggcttgtacaaaatcatgtccaaaatgggcatctccaccatcgcctcttaccgctgcagcaaactgtttgaagcggtcggtctacacgatgatgtagtgggcctgtgcttccagggggcggtcagccgcattggtggagcaagctttgaagacttccagcaggatctgctgaatctgagcaaacgtgcctggctggcgcgtaagcccatcagccagggcggtctgctgaaatacgtccacggcggcgaataccacgcctacaacccggacgtggtgcgcacgctgcaacaagcggtacaaagcggcgagtacagcgactatcaggaatacgcgaagctggttaatgagcgtccggcaaccacgctgcgcgatctgctggcaattacgccgggtgaaaacgcggtcaacattgctgatgttgaaccggcaagcgaactgtttaaacgctttgataccgccgcgatgtctatcggcgcgttaagcccggaagcccacgaggcgctggcggaagcgatgaacagcatcggcggtaatagcaactccggtgaaggcggcgaagacccggcgcgctacggcaccaacaaagtgagccgcatcaagcaggtggcttccggtcgctttggggttactccggcgtatctggtcaatgccgacgtcattcagattaaagtcgcccagggcgcgaagccaggcgaaggcggtcagttgccgggtgataaagtcacgccttacatcgccaaactgcgctatagcgtgcccggagtgacgctgatctccccgccgccgcaccacgatatctactctatcgaggacttagcgcagctcattttcgacctcaagcaggttaacccgaaagcgatgatctccgtgaagctggtttccgaaccgggagtaggcaccatcgcgactggcgtggcaaaagcttatgcggacttgatcaccatcgcaggctatgacggcggcaccggcgcaagtccgcttagtagcgtgaaatacgcaggctgtccgtgggagctggggcttgttgaaacccagcaggcgctggttgctaacggcttgcgtcacaagatccgtttgcaggtcgatggcggcctgaaaacgggtgtcgatatcatcaaggcggcgattctcggcgcagaaagcttcggcttcggcactggcccgatggtggcgctcggctgtaaatatctacgtatttgccatctgaacaactgcgcaacgggtgtagcaactcaggatgacaaactgcgtaagaaccactatcacggcctgccattcaaggtgacgaattactttgagtttatcgcccgtgaaacccgcgagctgatggcacagcttggcgtaacacgtctggtggatctgattggtcgcaccgacctgctgaaagagctggacggtttcaccgccaaacagcagaagctggcgctgagcaagctgctggagactgccgaaccgcatccaggtaaggcactctactgcaccgaaaacaacccgccgtttgataacggcctgctgaacgcgcagttgctgcaacaggcgaaaccgtttgtcgatgagcgccagagcaaaaccttctggttcgatattcgcaacaccgaccgttctgtcggcgcgagccttagtggctatatcgcccagacgcacggcgatcaggggctggcagccgatcctatcaaagcgtacttcaacggcaccgcaggccagagcttcggcgtgtggaacgcgggcggcgtggaactgtacctgaccggtgatgccaacgactatgtcggtaaaggcatggcgggcggcttaatcgccattcgtcctccggttggttccgccttccgcagccatgaagcaagcattatcggcaacacctgcctgtatggcgcgaccggtggtcgtctgtatgccgcaggccgcgcgggtgaacgtttcggcgtgcgtaactccggtgctatcaccgtggtagaaggcattggcgacaacggttgtgaatatatgacgggtggtatcgtctgcattctgggtaaaaccggcgttaacttcggtgcgggcatgaccggcggtttcgcttacgttctcgatgaaagcggcgatttccgcaaacgcgttaacccggaactggtcgaggtcttaagcgttgacgctctggcgatccatgaagagcatctgcgtggtcttatcaccgagcatgtgcagcataccggctctcagcgcggtgaagagattctggcgaactggagtaccttcgccactaaatttgcgctggttaaaccgaagtccagtgatgtaaaagcactgctgggtcaccgtagtcgtagcgcagctgagttgcgcgtgcaggcgcagtaaggggtagcaacaatgagtcagaatgtttatcaatttatcgacctgcagcgcgttgatccgccaaagaaaccgctgaagatccgcaaaattgagtttgttgaaatttacgagccgttttccgaaggccaggccaaagcgcaggctgaccgctgcctgagctgcggcaacccatactgcgagtggaaatgcccggtacacaactacatcccgaactggctgaagctcgccaacgaggggcgtatttttgaagcggcggaactgagccaccagaccaacaccctgccggaagtttgcggacgagtctgcccgcaagaccgtctgtgcgaaggttcctgcactctgaacgatgagtttggcgcggtgaccatcggcaacattgagcgctatatcaacgataaagcgttcgagatgggctggcgtccggatatgtctggtgtgaaacagaccggtaaaaaagtggcgattatcggcgcaggcccggcaggtctggcgtgtgcggatgtcctgacgcgtaacggcgtaaaagccgttgtcttcgaccgtcatccagaaattggcgggctgctgaccttcggtattccggccttcaagctggaaaaagaggtaatgacgcgtcgccgtgaaatcttcaccggcatgggtattgaattcaaactcaataccgaagtgggccgcgacgtacagctggacgatctgctgagtgattacgatgccgtgttccttggcgtcgggacttatcagagtatgcgcggcgggctggaaaacgaagacgccgatggcgtgtacgcagcgctgccgttcctcatcgccaacaccaaacagttaatgggctttggtgaaacccgcgacgaaccgttcgtcagcatggaaggcaaacgcgtggtggtccttggcggtggcgacactgcgatggactgcgtgcgtacgtccgtgcgccagggagcgaagcacgttacctgtgcctatcgtcgtgatgaagagaacatgccgggttcccgccgcgaagtgaaaaacgcgcgggaagaaggcgtagagttcaaattcaacgtccagccgctgggtattgaagtgaacggtaacggcaaagtcagcggcgtaaaaatggtgcgtaccgaaatgggcgaaccggacgccaaaggccgtcgccgcgcggagatcgttgcaggttccgaacatatcgttccggcagatgcggtgatcatggcgtttggtttccgtccacacaacatggaatggctggcaaaacacagcgtcgagctggatagtcaaggccgcatcatcgccccggaaggcagcgacaacgccttccagaccagcaacccgaaaatctttgctggcggcgatatcgtccgtggttccgatctggtggtgaccgctattgccgaaggtcgtaaggcggcagacggtattatgaactggctggaagtttaagcgaggtaacaatgaattcgccagactgtgtctggcgaatcaaattactgacgaagtgcgcgttgttttctggcaaatgcggcatgagcgtttgacctttcctataatagggataattttcaataaattgtgctttgttcaccaagtctgatgagtgaagcacatcaagcaatttctcatttacaatccgtctcaattacttgttaacacctctgacaataccgattctgcaagctattcagtcttttcattccatgtaaattgtctcgatattaatatacaaaatatgaatataaaaaaccaatatattatccttaattatctatatattttcctatttttcagcgcaaacattcatgtaatgaataattatcaccacaaaccacctcaccagcaccttattattcacatgatcgtaactataaaattcattaaataaatacatcccagcaagttggctatttctgaacgagttatttatttacattcacaaacagatatatatactgcttcagctttttattttaaaaaataaatttgttattaaggatatgttcatatgtttttcaaaaagaacctcacaacagctgctatttgtgcagcactttctgttgcagcattcagtgccatggcaacagatagtactgatacagaattaactatcatcggcgagtatacccctggtgcatgtaccccagttgttacgggcggcggcattgttgactatgggaaacatcataacagtgcgctgaatccgaccggtaaaagtaataaactggttcaactgggccgcaaaaacagcacattaaatataacctgcacagcaccaacgctaattgctgtaacctccaaggataaccgtcagagcaccattgtagcgttaaacgacacatcctatattgaaaaagcttatgatactctcgtagatatgaagggaacgaaaaacgcctttggtttaggttctgcgcctaatggacaaaaaattggcgctgcatccattggtattgacaggtctaatggtgggattcacgcggcggacgatacaggtgaaattcctgtcgacctgattcaaactgaccactggagtgcagcgacccccacatggaaagccagttctaatggcgcattctgcagcctgacaagttgcagtgcaatcgagcgcggttattctgttgcaaaaacaggggaactgacacctgttgctattacagcggtcaccttcccgttactgattgatgctgcggtaaatgacaatactattcttggttctgatgaaacgatcaaactggatggtaacgtcactatcagcgttcagtatttataagaacttgtaatacagtttttatttttacgcattaaccagttagctataactcggacagattatgccctatgacatggtctgtcttaatcaatctcatcgcaaacagtgcataacatatattaacaatatgtttctgcgttatttatcattattacaggagttttaatttaaatgctcagacacattacattcactgtatttataacaacatcaatgaatactaacaatgccggacaggagtactatcaggcattcgttttatacgatcggttaatgtttcaggaaagctcttcgcatatcttggggaaagtaaatgtaatacgctgttcttaattgttcagtgctcaccccccagagtatagctcattccattattcaacttagctccatataaagggacagataatggaaagcctcagtgaaggaaccacagcaggctaccagcaaatccacgacggtattattcatctggtcgatagcgcccggacggaaacggtacgtagcgttaacgcgttaatgaccgcgacgtaccaggaaattggccgacgaattgtcgaatttgaacaaggtggcgaggccagggctgcgtatggtgcgcagctaatcaagcgactaagtaaggatttatgtctaaggtataagcgtgggttctctgcaaaaaacttacgccaaatgaggcttttttacctcttttttcaacatgttgaaattcaccagacaatgtctggcgaattaacaccattgggaattccgcagacaccgtctgcagaattcccaagcgcaaagatttggcagacgctgtctgccaaatctttccccttgcccaggtccacctacgtccgtttactttccgttaaaaacgctgacgcccgcagcttttatgaaaaagagacgctccgctgtggctggtctgttcgccagctagagcggcaaattgcgacccagttttatgagcggacactactgagtcatgacaaaagtgccatgctgcaacaacacgctcctgccgagacgcatattcttccgcaacaggcgatacgcgatccctttgtgctcgaatttctggaattgaaagatgaatatagtgaatccgattttgaggaggcgctgatcaaccacctgatggatttcatgctggaacttggggatgattttgcctttgttggtcggcagcgaaggttacgcattgatgacaactggtttcgtgtcgatctgctgtttttccaccgccgtttacgctgcctgctaatcgtcgatctaaaagtgggcaaattcagctatagcgatgccggacagatgaatatgtatctcaactacgccaaagagcactggacgctaccggatgaaaatccgcccatcggtctggttctctgtgcagagaaaggagccggagaagcgcattatgctctggcaggtttgcctaacaccgttctggcaagcgaatataagatgcaactacctgatgagaaacgactcgcagatgaactcgttcgaacacaggcggtgctagaggaaggctatagacgccgttaatttcagcggtttcgaattctgcagacagtgtctgcagaatctttaaaacgaactaagttttaagccattaaatcagccttaaccttcaccacaacctttttaatctctccaggctcgccgacaacgcatcctggtttatgcggttcacctggcataaacacggcgaacattcccggttttaagatgatggcttgctcgttatcaatggtgctgcaaagctgataatcatcctcatggtggaactcttcacactgacgcgcagtgcctgccatgccaaacagaatccgttcctcaccgtttaataacagctggatatcaatgtattgctcgtgcaattccgcttttttctcgacggggctttgagtgttaaacgtcatgacattcataaagatattgtcgccctgtaattcgtaacgacccggcgctttttcttgcggtctggcagctaatgccagcgttaacgcgtcctgtaacgcaggatgtaacccagcagacggtaaactctgtacttcacccatcatcataatttttctccctgggccaacagcgcagccccaagtaaacctgcatcatggcggtaatgcgccgccagtaaatcaacatgaaatgccgctggctcctgcgccagatacgtttccaccagcgccagatacccttctgccagaccaacgctgccaccgaccaccacgcactggcaatcagttgtggctttaatatcagcgatcagccttgcaagcgtacgtgcggagcggtgaatcagctgctgcgcctgctcgtcaccctgcccggcgcgcgtgaaaatagttttcgcatccgcgccagccaactccccctgcgctgccgctgcaatgccgcgaccagaagcaatcgcttccacgcaacctgtgcgtccacagccgcagactgggccgtgtggatcggcaagcgtatgcccgatatgccccgccagaccgccagggccggtaagcagtttgcagccgctcactacaccgccgccaacgccggtggaaacggtgataaagaccatatcggttatatcgccatccagcgcctgaaactccgcccatgctgcggcctgcgcgtcgttaatggcaatggtcggcaaattggtaagttgttccagcgttttgactaacggaaagtgtagcaatccaccaagattatgcggattaagcgccagcaagctgccgtcacggattatcccggtgctagcgatggcaacccgctgcgcatgagcttgcaacggagagactaatgcggataaggcatcacgcaaggcttctggtgtctggctggctggcgtaggaagttcacgacgatcgcggatctgcccgtcagcgccaatcagcgcggcggcaagtttagtaccgccgatatcaatcgccagtgtggtcatagcaccgcctttttcatcgctgtgttgtaccactgacaaatgtgctcaagacgcgtgattgcagaaccgaccgtcaccgcccacgcgccgtggcgcatcgcatccgccgcctgagcaggcgtgttgtaacgcccttcggcaatcacccgacatccggcgtcgctcaacgttttcaccagcgccagatccggctcttctggcgtttcaggcgtggtatagccagaaagcgtagtgccaataatttcggctcccagcttttggcatgccaggccgtcttccggcgtactgcagtcggtcatcgccagtaaaccgtgatggtgaatacgtgccagcagcgtttcaacaggcaccggacgcgggcggtcggtgccgtcaatggcgataatgtccgcgcccgcctgcgccagcgcatcaacatcttcaatataggccgtgatgcgtaccggagaatcctccagatcgcgtttcacaattccaataatcggcacgctcaccaccgcacgcgtggcttgcagatttgccacaccttcaatgcgaatggcaaccgcgcccgcctgttctgccgctaatgccatggcggcgacgatttcgggtttatcgagcgggctgtccggaaccggctggcaggagacaatcaggccaccgttagcagcgattttttgatccagttgtgcaagtaagctcatacatcttcccttagcgaaaggcccggtacatagaccgggcaacaggattaacttttggttttgactaaatcgtttttggcgctgccaaacggcacggcaccgctgaatggtttaccgtcgatagcgtcatgagtacgcaacgcttccgggcgcaaccaacgctgaacgcgagaaggcatatccagcccaatcagcaggatcaccacgaacgtcagactgaagctgaggcttgccagcgcagtacccagatccagacgttgagcgatcaacgcgccgatgattggggccagtgcaccgcccaatgcgccaacgttgtaggtaaagcccaggcccgctgcacgctggtcggtatcgaaataaccgccaatcagttttggtaagatcccggcgatcccttgtccaagcatttgctggaagaacagtaacagaccgagcacccagacgtttgcgccgccaatcgcaaataccggaataatcagcagctggctggccagcaggctacaaacgtacgctttgcgggttcccagccagtcaccgaggaagccacctacgcagcatcccaccgccgcgccaaagccactaaagaacagcacattggctacagtatgcgggttataagccagatcggttttcagatacgttggcagcagcgcctgaatcggccaactgtagaggaaagcaaacaacacgaccaccatcagcattacgcccgttggccagcgtttgcctgcactctgcaccataaagctgataaagattgcggcgcataacagcccaagaacagcgacgatcgcggcattttgcaggttaccggcgaagcagaaccacagcgcagtagccgccgccagtgtcattacgatattggcaatgcgatgttcaccacggtagagaatatccaccattgtgcgtactggtgctttacctgcgtgtttctctttccagtcttccgcttccgggatgtttttacgcagccagagagcaaagatgattggcaaaatgccgataaagaacagcgcacgccagccccagaccggaaccaccaggctatagacctgagcggcaacgacggcccccacagagaagccactaatcaaaaaaccactggctttgttacgcagatgttttggccagctttcaatgacataggtggcgctggaaccgtattcacccgccatccccatgccgatgaccagacgagcgataaacatggtgatgtagcctggcgcaaagccgcaggccagcgtcccggcgctgaagagaacgatgctggtgaccattgccagacgacgcccgtagcggtcacccatagcgccgagcatcaggccgccgaaccagcgagagataaaggctgcagagatcagacttgccgcctgcaccgtcgtcagcccgaattcaccttgtacttcggtgagtaccagggcgattaaaacgaaatcaaaaccgtcaagcagatatcccaaccaggcagcggaaaatgcgcgccattgtgcacggttgagatggcgataccacgggatattctgggttgtagtactcattgtgagtctcccgcggtgggcgatgcccacacgctttggtatgaaaattgtagggtacagatgcgtttatttcccctcacccggtaggggcgagcgaggggaaacaactcacccgcgctcttgcatcaactgctgggccagcgccttcagttctggcagatatttttcatctaccggtccaaacggtttgcggcacagcggcacagaaacgacatccatataatggaggacagttttcaggccgcggaatacgcccgttttgatcagtaaatcaatgactttattgcattcagtttgcagtttctgcgcggtctggatatcgccttctttcagcgccttaacgatcccctgatagcgccagcccatgatgttgtaggtactgccgataccaccatcagcgcccgccagcagaccagaggcgaagatttcgtcgtaaccgttatagagcacaagatcaggatgttcacgacggatctgctccatctgatagagatcgccagaggtctgtttcagcgcacctacgccaggcaatgtaacaagtgtgttgatctgatccagggtcagttttaccccactcagggctggaatgttgtacaccaccatcggcaaaccatccgcgctatcaataattgcccgatagtgatcgcagtgttcttcaaagctgaaaggatagtagaacggcgtgacggcggagacggcatcgaagccataacgtttagcgcttgccgcaagttgttggctttcggcggtgctgacgcaaccgacgtgggcgatgagtttaatcttacctttcgcctcttcggcgacgatttccagtacctgttcacgctcggaaaggctttgtacaaaggcctcgccggtgctaccacccacgtataaaccgtcgatgccctgctgaatattgaactgaaccaggcgacgcagactcgctttatccagtgcttgttgttggtcaaaaggagtcaggagtgcagccattacgccacgtaaattcgttgccataaatacctctgaagtgatgcttgtctgataaacgatatacctttatacctgttataccagatcaattaagcaacaccccatacagaaagcttataatgcgatctgcttcactaaagtggcattatttctttttgttggtggtctgaccgaaagcgtgccaggtagcagagacgctgttgagatggctttgcaacgcacgatcggcttcgtcaggatcatgacggcggatcgcatcaacgatcgcaatatgctgttgataactaacgttgttatgttcgtgcagtgcctgatcggtaaccgttgggcgtgcggcaataagccagtcgagcagggcaacgtggatcgccatgaagattgggttaccggggatctccgccagcacgcggtggaaatcaacgtcactacgaatgaatgccgcgttgttatccaggctctgactgttgatttccagtgcttttgccagcaaatcgatttgctcatcggtggcatgttcagccgcatagcgcaccagactggattcaaagaacagacgtaattgttcgaaatgggcaatcccaccgggatgagaaaggaaatctttcgccatgccggaaagctcaccgatgatagtgtccgcagaaggacggctgacgcgagcgcgttcgccgttgtttatttgcaccagacctttgcgttttaacgctgccagcgcttcacgcacgctaggacgcccgacgttaaagaacgccatcagttcgcgttcagacggtaattgttcaccttcgccaaattcacgacggcggatcatctgttccagctcttcttccaccatttcggagagttttttacgcgccagcgggcggctacgcaagttgcgaccaattgcaggactagaatcttcggtttggctatcaaatgcgttcataaggcccattctgtaaggtcagtgtgattaacatcatcagtgacatcctatcacaggattgaaagtaggggaaaatggcagggttttctctttgtgcctcatcattaccataattaacggaataattaactattgcgaaaaattaatgtaacgcagataaaaacatcccgtttgaattatttataagactattcacgagcattatgaatattatgaatgtgttcttacaaaataatcataagcgcatattttttaatgaaaaatcacctcacctacaattaaaaacacgacatccgcaccataaatagccttgcaaaaaatataacatcgttgttttcaatctgccgtttatgggattgaccgttttcttttgacacggagttcaacaatgttcggcataattatatctgtcatcgtattaattacgatgggctatttgatcctgaaaaactacaaacctcaggtggtgctggctgccgcaggtatcttcctgatgatgtgcggtgtctggttagggttcggtggtgtactcgatcccaccaaaagcagcggctacttgatcgtcgatatttataatgaaatcctgcgcatgctgtccaaccgcattgccggattggggctgagcattatggcggtgggcggttatgcccgctacatggagcgcataggggccagtcgcgcgatggtgagcttgttaagccgcccgttaaaactcattcgcagcccgtatattattctgagcgcaacttacgtcatcggccaaatcatggcgcagtttattaccagcgcctccggtctgggtatgttgctgatggtcaccttatttccgacgctggtgagtctgggagtaagtcgtctctctgcggtggcagttatcgcaaccacgatgtccattgagtgggggattctggaaacgaactccatttttgctgcccaggtagcgggaatgaaaattgccacatacttcttccactaccagcttccggtcgcctcttgcgtcattatcagcgtggcgatctcccactttttcgtgcaacgcgcttttgacaaaaaagataaaaatatcaatcacgaacaggcagagcaaaaagctctcgataatgtcccgccgctctattacgccattttacctgtgatgccgttaatcctgatgctcggcagcctgttcctcgcccacgtcgggctgatgcagagtgaactgcatctggtggtggtgatgttactgagtttgactgtgacgatgtttgttgagttcttccgcaagcataacttgcgcgaaacaatggacgatgtgcaggcgttttttgacggcatgggtacgcagtttgccaacgtggtaacgctggtggtcgcgggtgaaatatttgcgaaaggcttaacgacgattggcactgtcgatgcggttatcaggggggcggagcattctggtctgggcggtattggcgtgatgattattatggcgctggtcattgccatttgtgccattgtgatgggctctggcaatgcgccgtttatgagttttgccagtcttattccgaatatcgcagccggactacatgtaccagcggttgtaatgattatgccgatgcattttgccacgacgctagcgcgcgcggttagcccgattactgcggtggtggtcgttacgagtggaattgcaggcgttagcccttttgcggtggtgaagcggacagcgatccccatggcagtcggtttcgtggtgaatatgattgccacaatcacgctattttattaagtcattaaaaagacaaaacaggccgcctgggcctgttttgtattacttcacaacgcgtaatgccggtcgaccaccgcgtggtggctgcggaggttcatcgtcaggatgagtgtcatcatcgtgatctggcttgtcgccatcaataacgctcataacggtttcgttgtctgcgcttgcctcttcatcattcatgatgctggtatcttcatcgtaggcagcttcaggctcaaacatcgtgcctgcgccattttcacgggcgtagatagccagcacggcagccagcggcacagaaacctgacgcggaatgccaccaaagcgcgcgttaaagcgcacctcatcattcgccagttccagattgccgacagcacgcggcgcaatgttgagtacgatttgcccgtcacgcgcatattccataggaacctgcacgccagggagcgtcacatccaccaccaggtgcggcgtgagctggttatccagcaaccactcatagaatgcacgcagcagatagggacgacgtggtgttagctgactcaaatccatacagattaactccggcccagacgcatttcacgttctgcttcagttaaagaagcaaggaaagagtcacgctcaaagacgcgggtcatatagcctttcagctctttcgcacccgggccgctgaactcgatgcccagttgcggcagacgccacagcagcggagcaagatagcaatcgaccaggctgaactcatcgctcaggaagtacggcttctgaccgaagaccggcgcaatcgccagcagttcttcgcgcagttgcttacgtgcggcatctgcttcagaagcactaccgttgatgatggtgttcatcagcgtgtaccagtctttttcgatgcgatgcatgtacagacggctttcaccgcgagctaccgggtaaacaggcatcagtggcggatgcgggaaacgctcatccagatattccataatgatgcgagattcccacagggtcagctcacgatccaccagggtcggaacgctctgattcgggttgaggtcaatcagatcctgaggcggattgtccttttccacgtgttcgatctcgaaacttacacctttctcagccagcacaatgcggacctgatggctatagatgtcagtaggaccggaaaacagcgtcattacgctacgtttgttggcagcgacagccatgaaaacctccaggtatagtcagaatttttactgctaccagccaccaggtggccagtcagaagttgtgttacccaataaggaacgactctctttgttcgaaaatcaaacaaaaaatgagcaatacccgacatttgggcagaaaattggatgatagtttaccagattttgcgaccattgtggtgagtcgatgccggaaatggggaaaaagagatgcgctttagtctgaaatagttgacttagtcccttattggcgatgtggtttttgttttacctgtctgtcaggtggcagcaaaaagcaactttccagtttttacgctgattcagattttagctataaaaaaacccgccgaagcgggttttttcgaaaattgttttctgccggagcagaagccaattaacgtttggagaactgcggacgacgacgtgctttacgcagaccgactttcttacgttcaacctgacgagcgtcacgagtaacgaagccagctttacgcagttcagaacgcagggactcgtcgtattccatcagagcgcgggtgataccgtgacggatcgcaccagcctgaccagagataccaccacctttaacggtgatgtacaggtccagtttctcaaccatgtcgaccagttccagcggctgacgaactaccatgcgggcagtttcacgaccgaagtactgttccagagaacgttggttgattacgattttaccgttgcccggtttgatgaaaacgcgagctgcggaacttttgcggcgaccagtgccgtagtattgattttcagccattgcctataatcccgattagatgtcaagaacttgcggttgctgtgccgcgtggttgtgctcgttacccgcgtaaactttcagtttacggaacatagcacgacccagcgggccttttggcaacatgcctttaaccgcgatttcaatcacacgctcaggacggcgagcaatcatctcttcaaaggtcgcttgtttgataccaccgatgtggccggtgtggtgatagtacactttgtcagtacgcttgttgccggttacagcaactttgtcagcgttcagaacgatgatgtaatcaccggtatctacgtgcggagtgtattccgctttgtgcttaccgcgcaggcgacgagccagttcagtagccagacggcccagagttttaccggtcgcgtcaacaacataccagtcgcgttttacggtttctggtttagctgtaaaagttttcattaaaagcttacccaataaatagttacacgttggtgaacacccaaacgtcttcaattgttgaggttcacacgacaaagtccggcaaacctaccccttcgaatagcctatgccagcacacaaaaagttttgggaaaaaaactttcttgtaacgtggggtcgcaggattatagagaagtcggggtcaaagatcgacccctttttgtgatttgtgacaggttttaacccgccaaatgctcgcgcttcagatactcttcgctttgcatctcttgcagacgactcaggcaacgctggaactcaaacttcagccgatcgccctgataaatttcatacagcggcacttctgcactcaccactaatttgacatggcgctcgtaaaactcatccaccagcgcaataaagcgccgcgcttcgctctccatcaaccgcgtcataactggtacatcaaacaacatgaccgtatgaaagagacgactgagcgcaatatagtcatgctgactgcgggcgtcgacgcacagcgtagtaaaagagaccgccagcgtctggttctcgacgcccattgttgctaatggccgatggttgatttctaacgtcggactattttctcgtttcccccccgccagcgccaaccatagtttatccatttgcgcccgggtttcatcgtgaagtgggctaagccacagatgcgcctgagtgagtgtacgcagacgataatcaacaccagcgtccacgttcattacatcacaatgctgtttaatggcatcgattgcaggcagaaaacgcgcacgttgcaggccatttcgataaagttcatccggcggaatattactcgtcgctaccagggtaataccgcgagcgaacagggctttcatcagaccgccaagtagcatggcatcggtaatatcagaaacaaaaaattcgtcaaaacagagcacgtcagtttcggctttaaagcgatcggcaataatttccagcggatcggtctgcccctgtaaggcagttagctcttcatgcacccgcagcataaaacggtgaaagtgcaggcgctgtttccgctctcccggcaggctttgatagaaaaggtccatcagccaggttttcccgcgtcctacaccgccccacatatataagccacgcactggcgtatgctttgtgtcttcgcgtttaccccacagcttaccgacccgcgccattagcccactcgtcctgggggctggtggcgtgctattgatgagttcctgataaataatttccaggcggctgacggcctctttttgaacgtcgtcgggttgatggctgccttcattaagcgccttcaggtattggcttgttggggtaacgctttgcatgatcttattgttattccttgaataatcggtgcgccgttgttcacggttgacgaaaaaaaggccgttctacactacgcgatatgcagtcgggattccacttctgtggaattaacggttatagtggcataatcagccgcaggcatggagcctgaagccaacaccctacggaaacaaaagacaacgggagatgttcatgacctgggaatatgcgctaattgggttagtcgtcggcatcattattggtgctgtggccatgcgttttggtaatcgtaaactacgccagcaacaggcgttgcagtacgaactggaaaagaataaagctgaactggacgagtatcgcgaagagctggttagccactttgcccgcagcgcggaattactggataccatggcgcacgactatcgccagctgtatcagcacatggcaaaaagctccagcagcctgctgccggaactgtctgctgaagcaaacccgttccgtaatcgtctggcagagtctgaagccagcaacgatcaggcaccggtgcagatgcctcgcgactattctgaaggcgcatccggcctgctgcgtactggcgcgaagcgcgactaatttatttttcgggcgcagccattgcgccctcctcttctctccctccccgactatcatttaatctggtgtctcattgttagccgtctgaaaattcaataacatcaaactgttttgaatctcttttcttatcattcaggtacgagagcaggaataatgaaaaaacaaacccagctgttgagtgcattagcgttaagtgtcgggttaactctcagcgcgagttttcaggccgtcgcgagcattccaggccaggttgccgatcaggcccctctccccagtctggctccaatgctggaaaaagtgcttccggcagtggtgagcgtacgggtggaaggaacggccagtcagggacagaaaatcccggaagaattcaaaaagttttttggtgatgatttaccggatcaacctgcacaacccttcgaaggtttaggctccggtgtcatcatcaacgccagtaaaggctatgtgctgaccaacaaccatgtgattaatcaggcacagaaaatcagtattcagctcaatgatgggcgcgagtttgatgcaaaactgattggtagcgatgaccagagcgatatcgccctgttacaaattcaaaacccgagcaaattaacgcaaatcgctattgccgactccgataaattgcgcgtcggtgattttgccgtagcggtcggtaacccatttggccttgggcaaaccgccacctctggcattgtttccgcattaggccgcagcgggttgaatcttgaaggtctggaaaactttatccagacagatgcttccattaaccgcggtaactccggcggtgcactattaaaccttaacggtgagttaattggcatcaacactgcaatccttgcgcctggcggcgggagcgtcgggattggatttgccatccccagtaatatggcgcgaacactggcgcagcagcttatcgactttggtgaaatcaaacgcggtttgttaggcatcaaaggcaccgagatgagtgccgatatcgccaaagccttcaaccttgacgtgcagcgtggcgcgtttgtcagcgaagtgttgccaggttctggcagcgcaaaagcgggcgtcaaagcgggcgatattattaccagcctcaacggcaaaccgctgaatagctttgctgagttgcgctctcgtatcgcgaccaccgagccgggcacgaaagtgaagcttggcctgctgcgtaacggcaaaccactggaagtagaagtgacgctcgataccagcacctctagcagcgccagcgctgaaatgatcacgccagcgctggaaggtgcaacgttgagcgatggtcagctaaaagatggcggcaaaggtattaaaatcgatgaagttgtcaaaggaagcccagctgctcaggctggcttgcaaaaagacgatgtgatcattggcgtcaaccgcgatcgggtgaacagcattgctgaaatgcgtaaagtgctggcggcaaaaccggccatcatcgccctgcaaattgtacgcggcaatgaaagcatctatctgctgatgcgttaatgtcgtaaaccgggcatcaggcttacgtgtgatgtccggttaactcgtggtatgctgctgccgttcccttttttaatgacgcctccatcatgtttgtgaagctcttacgttccgttgcgattggattaattgtcggcgctattctgctggttgccatgcctagcctgcgcagccttaacccgctttccactccgcaatttgacagtaccgatgagacgcctgccagctataatctggcggttcgccgcgccgcgccagcggtggttaacgtttacaaccgtggtttgaacaccaactctcacaaccagcttgagatccgcaccctgggatccggtgtaatcatggatcaacgcggttatatcatcaccaataaacacgtcatcaacgacgccgatcagatcatcgtcgccttacaggatggacgtgtatttgaagcattgctggtgggatctgactctctaaccgatctggcggtacttaaaattaatgccactggcggtttacctaccattccaattaatgcacgtcgcgtaccgcacattggcgacgtagtactggcgatcggtaacccgtacaacctcgggcagaccattacccaggggattattagtgccacgggtcgaatcggtctgaacccgaccgggcggcaaaacttcctccaaaccgatgcttccattaaccacggtaactctggcggcgcgctggtgaacagcctgggcgaactgatgggcattaatacgctgagctttgataagagtaacgatggcgaaacgccggaaggtatcggctttgcgattcctttccagttagcaaccaaaattatggataagctgatccgcgatggtcgcgtgatccgcggctacattggtatcggcggacgtgagatcgcaccactgcacgcgcagggcggtggtatagatcaactgcaagggatcgtggttaatgaagtgagtcctgacggcccggcggcgaatgcgggtattcaggtcaacgatctgattattagcgtggataacaaaccggccatctctgctctggagacgatggatcaggtggcggaaattcgccctggtagcgtgatccctgtagtagtgatgcgtgatgataagcagttaacgctgcaggtcaccattcaggaatatccggcaaccaattaagtcgtgcgctcaaaacaaaaaaccggagtctgtgctccggttttttattatccgctaatcaattacttattaacgaactcttcgcccagggcgatatctttcttcagcgtatccagcataccttccagcgcgttctgttcaaatgcgctcagggtaccgatagatttacgctcttccacgccgtttttacccagcagcagcggttgagagaagaaacgggcgtactgaccgtcgccttcaacgtaggcacattcgacaacgccttgttcgccctgcagtgcacgaaccagagacagaccaaaacgtgcagctgcctggcccatagacagggttgcagacccgccaccggccttcgcttcaaccacttcagtacccgcgttctggatgcgtttggtcagatcagccacttcctgctcggtaaaactaacgccaggaacctgactcagcagcggcagaatggtaacaccagagtgaccgccaataaccggcacttcaacttcgcctggctgtttgcctttcagttccgcaacaaaggtgttggaacgaatgatatccagcgtggtaacgccgaacagtttgtttttgtcataaacaccggcttttttcagcacttcagcagcaattgcaactgtggtgttaaccgggttagtgataataccaatgcacgctttcgggcaggttttcgcaacttgctgtaccaggtttttcacgatgccggcgttaacgttaaacaggtcggaacgatccatacccggtttacgcgctacgcctgcagagataagaacgacatctgcgccttccagcgccggagtcgcatcttcaccagaaaaacctttgattttcacagcagtagggatatggctcagatcgacagccacaccgggagtcactggagcgatatcatacagagagagttcactaccactaggcagttgggtttttaacagtagtgcaagcgcctggccaataccgccagcagcgccgaggactgcgactttcatcctaaactccttattatattgataaactaagatatgttgctccgctgccgcgaccttaatccacaaaattgccgtttacaatgaccacatctcaagaatgtgtagtcacgcaagtttagcgtttatgcatttaattgccgtaatcaggaacctaacttacgtaattaacagtcgcttatgcattagcgcaacattccaacaggtggtgacaatataccctaccgttcagccaaaacaacatcaatttgataacaattaatttacttttaagcagaatttgcatgccgtgacgcaggcatgtttctcaataacgaaatttgataaaatcccgctctttcataacattatttcagccttcttcagggctgactgtttgcataaaaattcatctgtatgcacaataatgttgtatcaaccaccatatcgggtgacttatgcgaagcagcgctaagcaagaagaactagttaaagcatttaaagcattacttaaagaagagaaatttagctcccagggcgaaatcgtcgccgcgttgcaggagcaaggctttgacaatattaatcagtctaaagtcagccggatgttgaccaagtttggtgctgtacgtacacgcaatgccaaaatggaaatggtttactgcctgccagctgaactgggtgtaccaaccacctccagtccattgaagaatctggtgctggatatcgactacaacgatgcagttgtcgtgattcataccagccctggcgcggcgcagttaattgctcgcctgctggacagtctgggcaaagcagaaggtattctgggcaccatcgctggcgatgacaccatctttaccacccctgctaacggtttcacagtcaaagacctgtacgaagcgattttagagctgttcgaccaggagctttaatctctgccccgtcgtttctgacggcggggaaaatgttgcttatccctctcaaccccctgctttcccctgcgattaatttaacgaatagtgcgttttactgcgacatgtcattcacacaatgaatacataaggtaaaaaaagcacattatgcaaaattcattatctaattgaaaaaactagaattaacgataaataaccgtatttttaattcttttttgttattaaaattcacatttttaacacttagtatcaactgaaacagttagcgcggtattaattagctcaataattagtgtatacttgattttgtgatatgggtcacgaaacaaaggcccagctaaaagattatgtcgaggtaaaaatcatgaaaatcaaaaccactgttgctgcattaagcgtactttctgttctctctttcggtgcattcgctgccgactccattgatgctgcacaagcacaaaatcgtgaagcaatcgggaccgtatccgtaagtggtgtggcgtctagcccaatggatatgcgtgaaatgctgaacaaaaaagcggaagagaaaggcgcaacggcctaccagattactgaagctcgtagcggtgacacctggcacgctacggctgaactgtacaaataaaccctcatcgtcttgtccgacgatattgcccccggttcgggggcttttttttgcgttaatgacgaacattaaaacgcaaatgcccttccagctcttcctctgcctcatcaaacagcaatattaacgcgccaaaacggcgacgcgttttctctcccagatgaacaaattcaatctcaagtggtagcggcaggacatcgttcattaacacatcccatagactgtcgagatcgcgtaccttatctttcgccagaccaaaggtttggctaaagtcacgataaaaatcctcctgactctcaatctcatcaaaatcaaaggtataaatattcatctgttgccaccgtcacgtttcgcggcgagttctgccgtgcatcgctaagtatagccatgaaaaaaccgacgcttttggcgtcggttttgacttaactatcggtcaacgcatgttgatacttatggagcatccccgccagccgatttaccggttccgtcacctgcggtggcgcttgccagatgcgtagcttttcctggtagatttccagttcttccagcaactggccaaagtaccgacgacgtttatcatcgctacgggcagatatcacatggtctgctgtgcggcgcatttgtcggtgaaacgcgcttaaatcctcgttaaccgggatcggtgcatcacgcaggcgctggtgcgcgataatcatcgtcagcgccaggcgaaatttcggcaaatcccctgggaacttattcatcagcaaaaacagctgctgataaagtgccgggaggtggttctctttacgacgtgccacattggtagtcatcgcggaaacagcggcagaaacaaactgattaagcagtacacgtccggtcctgtcgcggcttttatcccgcaccagcaaaataacggtgaacgcgagcacacagccgacgatttgccctaatgcgctgtcgagaaactgactgaaatggaaagtcatcgggttatccagcacgataatatttatggtgctggccagtgcccccatgctgcccagtcgccgtttctgtacttctataccgaggaagaatcccagcactgccaggctaatgcacagcagcaacatgctctgttgggtattagggataatcaccaaaaagtagagcagccctaacggcagcgcggccagcgtcccgtagataaagtcgatcgccaccatgcgtggattcggcaaacgcattgccagactcgtcactaccgcaatcatcaccattgcaccactgccggaagtccagcccgtccacagccagaaaagcgtgcccagaatgcaggaaagtgtggttcgccagaagttaaccattgcatgatgacgttcggcactctctacttttacttccggttcgccttgcaggatctcttcttcggtggcgttgatttttgtgttactgataacgccgcgcttgagaagctgataacgcgttgccgccgcgacccagctataaatggtgacaggcgtttcccgttccccggtccaggcgataactctccgcaggcgtttgagctgcttgtggacgtcctgcgcggtttctaccggcgtgtcaaaaaattcgcggaaagtatcagtgatcaattccgggcgcgtattctgaataagataagtttcgcaggattgggtaatcagcgtcaggcttagcgtattgatcgcttttaaacgtcgattggcccgcgcccagcgggaagattccatattcaggttgctgcgcatgccttgtagcgccgtggtgcgtcgcaccaggtcgccccaggctttatcgacaacttcaccatcgccatgcttgatacagagttgcattaattgatattgcgcgaccagcaaactttccagctctcgatccacttcttgtttgatgcttcgcggagaaaagagcaaatccgccataatcgcacacacaataccgataacgatctcgctacaacgttcgacggcaaactgcggcgtaagcaatggttccggctgaatggtgatcacaatgatcagcgcggtataaccggccagcccccacgcatagctgttttctattcgtaccaggctggatatccaggtacaaaaaccggcccagatacagcacaccagaatcatcaataatggtgcgcggatcatcgcaatgatgatcaccagtccggcaatacagccaataaatgtgccgatgatgcgcaaaaagccacgatagcgaatagcgccagaatacggttcacctcccgcagcaaaggccgtaccggcggcaacaatcgccgctgtcagtaccgcccagcgtggcgtttccagctggaagtgaaagccaacaaacagcgccagtacaatggcggtcgccagttttaccgcaaagcgaatatgttggttagcaatggagaaaatacccatcgtgattaaccaaactcacgcaggcgatgggccattttacggaagaagctatcctggctttcgtcgcgatcttgtttgccagtgaccaccactgtagcagtggtgcccgcaggccagatgttctcttgctggttgtcgagacgaatacgaaccggaacacgttgcgcaagacgcacccattcaaggttagagtctatagtcgccatccctttgtcgtcacgcgtgctgctggcgttggtgacccctgcggcaacactatcaacagtccctttcagcactttgttactgccaagcggcgtgatctctgcacgataccccggacgcaccccttccagcttagtttcttccatataggccagtacatagaaggagttctgtttcaccagcgcaaccgccgtacttcctcgagtaataaactcaccggtatagacgttgaggttggtcacccagccatctgctggcgcgcggatcaccgtgcgttcaagatccagttttgccagatcgcgggtcgcctgcgctttcgctaactgatgcagaaccgtttgtagtacgttgttggcctggtcgatctcttcgcgagacatcgcctgcacaccgagacggttacgacgtccggcctcctggcgtttctcctgtgccagtacctgataataagcaacatcggcttgcgcttcctcaagcgccttttgatagcgcggctggtcgatggtgaacagtatctgtccttttttcaccagctggttatcatgaacattcacctgggtaatgagtccagaaacgtccggcgcgatcgcaacgacgtcagcgctaaagcgcgcgtcacgcgtccagggggattcggtgtaatagacccaggcattaaaaattgcgatgaaggccagaatgactaatacgaccgtgatggccgtacgggagaattttcttattagtgttttcacttcaacctcaaacgaacagtcggcttatcaaataaaacaagcagcaatagagcgcggtgttgaacaacgccggatgccagacaaagtcgtagatacctgttggcacaagtacccggcgcaccagccagaaaatcgccagacttaaaagcaattcaaaaaatatcggtgggaaggacagcccaaacaccacgataacgggaaacagactcatgttgaccttggttgtaaagagagagcaggcgttattattttcagcatctgtcgccgcagagaagggcatggaaagccgggcgagagcaacattgctgtagattgatatttaatatattagcgtaactgttatgctgttatctatattatgtgatctaaatcacttttaagtcagagtgaataatggaacgactaaaacgcatgagcgtgtttgccaaagtagttgaatttggctcttttaccgccgccgccagacagctacagatgagcgttagctccatcagtcagacggtaagtaaactggaagatgagttgcaggtaaagctgttaaaccgtagcacacgcagcattggcctgaccgaagccggtagaatttactaccagggctgccgtcgtatgcttcatgaagtgcaggatgttcatgagcaactgtatgccttcaataacacccccatcgggacgctacgcattggctgttctagtactatggcacaaaatgttctcgccgggctgacagccaaaatgctgaaagaatacccaggtttgagcgtcaatctggttaccggaattccagcccccgacctgattgccgacggtctggatgtggtgatccgcgtcggcgcgttgcaggattccagcctgttttcccgccgtctgggcgcgatgccaatggtggtgtgcgccgcgaaaagctatctcacacaatacggcataccggaaaaacccgccgatttgagtagtcatagttggcttgaatacagcgtgcggcccgacaatgaatttgaactgatcgcaccggaagggatcagcactcgcctgatcccacaaggaagatttgtgactaatgatccgatgacgctggtgcgctggctgacggcgggtgccgggatcgcctacgtgccgctgatgtgggtgatcaacgagatcaatcgtggggagctggagatcctgctgccgcgttaccagagtgatccacgcccggtttatgcgttatataccgaaaaagataagctgccgctgaaggtacaggtcgtgatcaacagcctgacggattattttgttgaggtcggtaaattgtttcaggagatgcacgggcgcgggaaagagaagtaattcatattgtactgttacgttgtacaaacctgtgccaacgggttcccctcaccctaaccctcaccccaaaggggcgaggggaccgttcgtgcacgtagaaagattaattatccttctgaaaatagtgaaattattacgcagtaccgccaacagtcaggttatcgactttcaacgttggctggcccacgccaaccggcaaactttgcccttctttaccgcagacacccacgccgttatccagtttcaggtcgttgccaaccatgctaatctgctgcatggtttcgataccggaaccaatcaacgttgcgcctttcaccggcttcgttactttaccgttttcaatcagatatgcttcactagtggagaaaacgaatttgccggaggtgatatccacctgaccgccaccaaagttcggtgcatagataccgtactcaacggattcaataatttcctgcggggtgcttttacccggcagcatataggtgttggtcatacgcggcatgggcagatgggcgtaggattcacggcgaccgttgccagtcggcgtcatccccatcaaacgcgcgttgagtttatcctgcatgtagcctttcagaatgccgttctcaatcagcacgttgtactggcctggcgtaccttcgtcatcaatcgccacgctacctcggcgatcgaccatcgtgccatcatcaaccacggtacacagttcactagccaccagctccccgacctgtccactaaatacactagtgccacggcggttgaagtcgccttccagaccgtgaccaaccgcttcatgcaacagcacgcccggccaacctgcgccaagtactaccggcatggtgcccgctggtgcagcaacggcagaaagattgaccagcgccatacgcactgcttcttttgcccatgcatccgcacggacttcgccgtcgagatcggcaaggaagaattcataaccaaaacgaccgccgccgccactggcaccgcgttcgcgtttgccatcttcttcgacgagaacgctcacggaaagacgcaccagcggacggacatccgccgctagcgtgccgtcggtggccgcaaccaaaattaattcatagacaccactgaggctggcagtcacttcctgtacgcgcttgtccgcttcgcgggcaaccttatcgacgcgacgcaggatatccagcttctcttcacggctcatgctttgcagcggatctacgctggtatacaacgggctatgctctaccgcgcccagcgtctgtactttaccatcaccactatcacggacgatggtgcgcgccgcttgcgcactctgttccagcgccagcaggctgatttggtcagcgtaagcaaatccggttttttcaccgctgattgcacgcacaccaacgccctgatcgatgttgtaagaaccatctttaataatgcggtcttctaaaacccaggattcgtgatagctgctctgaaaatagagatcgccataatcaaggcgacgttcggccagttgaccgaggatcgcgaacaagtcctgatgtttcaggccgttcgccgctagcaattgttcacttaccaggttaagactcatcgtttttgctactcgttagttactgcagtagaggattttttacggctgccggatgcggcgtgaacgccctatccagcctacggttatgttccggtttgtaggcctgataagacgcacagcgtcgcatcaggcaacggctgtcggatgcggcgtaaacgccttatccgacctacggttatgttccgtttgtaggcctgataagacgcacagcgtcgcatcaggcaacggctgccggatgcggcgtaaacgccttatccgacctacggttatgttccgtttgtaggcctgataagacgcacagcgtcgcatcaggcaacggctgccggatgcggcgtgaacgccctatccgacctacggttatgttctggctcgttggcctttggcaacgattatcctatgagattggggcaattacgcgccctcgtcaaatcattgcgctttttctttacgcggttggcgcaacacttcgttgatttgcggatcgtccagcggaccgctaatgtgatagcgcaaaatggagactttgctccacagcggccccagcactttactggcggcaaacactgccgcgccaacaatggggttaaccgcaaaagccgcagccacgcccaccgtcgcagaaatctctggtgcgacaaccgcttccatattcaggtcgcgacgtaccagatttacgctccctttcatggcgatatccgcctccaggccatccaccagcgtgtcgtcggtgtgcataacgccgtctttaatccacgcggtgctgcgaatggagtcaaaatagaacccttcgccaaaagtgtctctgaaatcaaaacgcagcttacgcatcagggcatctacgctcaataagcgcagcaattgcccggcatgtccggtattgatttcggtaatttcgcctttacccagttgagtatgaatgatgccattcaacgtcgcttcatctggctgccagggtgctttgcgccagtgtaaatcgtaatccacattaaaactgctctggcgtatgggcgtcgtgacaccaaaaaattctgcggcggcatcaattttctgcccgcgcagttttcctttcaggctggtacgttcattccccggattattaacccattcaccatcggcagtaagccggctgaaaccagtatcaatcagtccattggtcagcgttaacgtatcgccagaaatggtgatatcactgtcaatgcgaccgaatttttgcccccagaaccagcactctgtgcatcgtatttgggcgtccggccagccacggaagttaatgcgctccgttgtcgggaaaggactactcggcgtactatcaccacgagttttcgccacgctcgggttgtaataaagatatttgatattcgccagccacggcgcgttattacgcatcgctagcgtggcgttgatttcacgcccttgcgcttcaaccagggtgccatttgccgtcggttggctaacaatactcaggttattccattgctgatttcccagactcaacataggcgtacgtaacgttatgtgttgtgggaaactcgctgcaccaccgacactctccgcagcgcctttctggaacagggccagccactcggcaccattcatcggcggcatattgagttcaacgccactttgttccggcaacggcgggagcgttttactgtctgccgcccaaatagcacgatcgagcgtcagcttttgaccgagcaaccagcggctattgaaatgattatccgcaccagcctgtccggttaattcaaagctgttgagattgccatcaaccttaacgtttaccgctagtggttcacccgcaggtttggctaacggactaggtaagtgactgctcacattctttagatcgccgttcagctctatgttataggtcgcaccagcatgataaggcagatcaatgcccactttaccatcccacgccacgctgccactcaatgcttcgttcaccgcttcaggcagaacgccggttttcgccggttgccagttaccgttgaggtttaccgctacctggtaggcttttgccccttctttggtggaaaaatccacgttcaacggctgattaaaccagcttgctgtcagtggttcactttgcagatcgctattgataaagctgaatttaccgctcaaatttttcagggtgctgtcgagtggtttgataaacagactgttattacgcagcgtcacttcacctttcgcggttaccagttcgccgttcagcgggatatcaagatgtaagcgagcattcacatcgccgtcgagctggagttcttgcagggtcgcacccagagaatctttcagcggtgtctcatcaaagtaagggccaacggctttacccggacctttaatgtcagcgtcaatcagcagtttttctttactgtagtcagggatcactgcggtaagattactcgcgcgcacgccgcccagattaacgccatcggttttcatccataaaccgtcgttaataaagtccagttcaatatcaaggttagttaatgcaggccagtccggctggaaggcaaacttcgcgttgcgcagcggcaccagcacttcaaactgaccttcgttgtgtttataggggaagagttgcggattgccaccataaaccagcgtcgcgttatccgcttcaccgccctgaatcgcgccacttaagtaatcaaccaggtctttacccatcaagttttccgggaaatagcgccaggcttgactaccatcatcggtactgatgccagccagaatacccagccagggttcatcgttagcaggttgcaggtaacgaaaaccgccgcgcgcatggacggctttggctttaacgtcaatattacgcccatccagctggaaacctttgttattgttcagccagcttatagttgcctggccgtcggcgatttctagtggcgcacggaataccgtttcgtaaggcatctttgcctgcttcatgctcgcggtaagcaaaccattttcaacgctgccggaaagcgtcccggagaagtgttccgcacccggtaataatttccattgcttccaggccagatcgctccagcttgcctgaaaacgggtcttgtctgccgcctgaagcgggatatccagcgccagagtgttaatcttgccgctcggttgtgtggagcgccaaacatcacccagtgcaggactaagtttcgcggccagcgggcgtatgccctccaggcctgccagctccagattactggcgcgaatccggagttcgtcactgcgtttattgtctttgccgccaacgtcctgttccggtatccaggccagcgtcaatgctccgctcggccagggtttgccgtccatcgtgatccgtgtatcgggaatagagaactgccagcccggattttcacgcgtaatatgcgcggtcagattatccacgctcagcgtatgcgtttgcttctcgcccaaccagctggcaccgccctgtttcagccagacgtcaccgccggttacatcgcctttgtcgatcgtcatccagccttcaagggagaactgtgccgtttccagcgcaatattgtcctgcatccatttaccgagccacggcttcaggtcgatgtcatccgcctggagccagacgcgaccattgcttaacaacccctcatcatcgcgcaaatccatgcgcacctgcatcacgccgtgctgtccggtaaggctggagaggcttaccaggccttccgcacggtgtcgacgtggatcgttcagccaggtgagttgtgggatcgccagctcggcgcgctgaccggatggcgtcaggaaactgacttcactgtcgcgaagatcgaaatggtcaaattgacgaagaaacagatcgctgatgtgactggcttccagactgtcatcactaccaccgctggtgataggagtgttggtgcgaaagcgcagctgccagaaagtgaggtcgcgaaactgccagcgcatatgtaacaggctctgccagacatccagcgccagagtaacgcgtttaacgctaaattcgccgccatcttttagttctgcacggatgtcgtgtgcttcaagcgtcgggccaaaattctgccagctggcactgagctgactggcttctaccggcatgccagtcgcggattctattttgttgaggatttccggacgccaggcgtcaagatgcggtaaagcaatacgcaggccgctaaccagcagggcagcgatcacaacgagcgcggctccagtaagcagtaaaatccccggcaatcgcctcacccgtcactccttgtctgctaaaaatgtgactcaaaaaccctttgccggatggcggcccagcatctgtttacatcattacgacgtcaaactgctcctggttatagagcggttcaatttgtactttaacctgtttgccaacgaaaatttccacttccgccaggctgtgactctcttcgcctttcaaggcttcagctactgccggagaagcatagaccaggaaacggtcggagtcgtaagcatggtggacacgaacaatctcgcgcatgatttcatagcataccgtttccacggttttcaccgttccgcgaccgtggcaggttgggcattcgttacacagtacgtgctcaatgctttcgcgggtgcgtttacgcgtcatctccaccagccccagcgcgctaaaaccattaacgctggttttcacccggtctttgctcaacgcctgctccaggctgtgcagcactcggcggcggtgatcttcattattcatatcgatgaaatcaataatgataatcccgcccagattacgcaaccgtaactggcgagcgatagcctgcgtcgcttcaatattggtattgaaaatggtgtcgtccagattgcgatgaccgacaaacgctccggtattgatgtccacggtggtcatcgcttcggtctggtcgataatgagataaccaccggatttcagttctactttgcgttccagcgctcgctggatttcgttttcgacatcaaagagatcgaaaatcggctggcgtcctgtgtaatgctccagcttgcttgtcatctcgggaatgtactcgctggtgaactcaagtaacgcttcgtaagtcaggcgactgtcaacgcgaatgcggtccagttcggcatcggcgaaatcacgcagaacacgctgcgccagcgccagttcgccgtacagctgataacgggtctgcgggcgttttttacgctccataactttggtccagacgcgtttcagataagcggcatcggaggccagttcagcctcgccaaccccttccgctgcggtacggatgataaacccgccctgctcgtcgcaatactctgcgaccacttttttcaggcgttcacgttcactttcgctttcaatacgttgggaaaccccaacgtgagaagcccctggcataaacaccagatagcgagaagggagcgtgatatcggtggtcaggcgcgcacctttagtgccaagcggatctttcaccacctgcaccatcagatcttgcccctgacgaaccagttcgctgatgtcgcgcaccgtgaattgcttttgttcttcacccgccacacattcggtgtgcggcatgatgtcggatgcatgaagaaacgcggctttatccagcccaatatctacaaaagccgcctgcatacccggaagtacacgacttacacgacccttgtagatattgcctactattccgcgtcgcgcctcacgttcaatatgaatttcctgcagaataccgccatcaatatacgccactcgcgtttcgctaggcgttacgtttactaacaattcagccgtcatgtttatcccttttctcacgcagtgcgttaaaattacttaataattcatacgtttcaaccagcggtaagccgactacggcgtgatagctgccatttatcttcctgacaaaacagccacccagcccctgaataccgtatgcacctgctttatctaacggttcatcgctggcgacatagcccgcgatgtcttcgtctgttaacgttctgaaagtcacatcggtgaccaccaggcaatcgagaatgtgctggctgtcggccaacgccactgctgtcatcacctgatgggtctgaccgcttaatttgcgcaacatctgcgccgcatgctctgcgtcgcgcggtttctccagcacttctccgttcaggataacgatagtatccgcacccagcaccgggagatccttcgccgtttgcgcgacacctgcccgtgctttctcgcgcgccagacgcacaacatactgctgcgcgctctcctgcggctgacgctgctcctcaatgcccgtaacaatacgttcaaaggtcacgccaagttgcgcaagtaactcctgacgacgcggagaaccggaagctaaatacagagaagtcatagaaacctttattgcactgcaaactgctgacggactttgcgcatcagcaagaaaatccacggccagagcaccccattgactacactactccagaacacttccggtctgaaagagacgttaatcactaaaaactctgcccagaaaacaataatatccaccaccaggctaagcaacatgacgaccagcgcctgctgccataatgcgaggttgcggaaaagctggtatttcagcgccaccaggtaagcaatgatgctcatcgccaatacgcgtacgccaagcgtgctgccgctgatcagatccagtatggcacccatcacaaaacctgtgcccacatttacgcgatgaggcaaggccaggatccaatacaacaagatgagtaacacccagtttggccggaaaacaatcaggttatccggccagggcatgatttgcagcaacagcgcaatgaggaaagagagccagattacccagcgtccctggctacgatagctcgccactattgccctcccggcgcacgttattgccctcccggcgcacgcgcaggcggttgagcaccactttgcggcggcgtagccctttgtggagagcgattagcagcaggctgtgtcggcgcagcaggcgcagtagctgcatttcctgtcgccggttgctgcggagtcggctgagcgatccccgttgccggttcaggtaactttggccccatcgcgtctgggctaggcaatacctgcggcatcatctgcatcagacgttcattagcaacacgatgcacctcttccggcgtcatcgggttagcgccgttacgatctgccccccacagcagcagcagataacgcaaacgttgcagccctgcagtcggacgcgcctgaatcacagtataagcgcgctgggtatcgagttttacggaagagacaaccgcgaccggatagccttccgggaaacgaccgcccagaccggaagtcaccagcacatcaccaacacgaatatccgtattcgccggcagatgctcaagctgcaaatcatccgtacaaccgttaccggctgcaattacgcggatatcgttgcgcagcacctggattggcagcgcgtgggtcgcatcacaaatcagcagcacgcgactggtcagtttagcgacggccaccacctgaccaacaacacctttgtcgctgatgaccggctggccttcataaacgccattaacgctacctttatcgataacaacttgatcgctataaggatcgttaaccgtggagataacctgagtcaccattttctgctcatcctgacgcagcggggaacccagcagctcgcgcagacgcgcgttctcctgtttgtattgtccaagcatcagcagttcactgtttttcagcaacagttcctgacgtaacgcccggttttcaagttctaattggtcacggctggccagcgtctggcttacgccatccagcaattcacgaggagcattggaaacaaagtagaaaggactgacggcggtatccatataagtacggatttgactgaacgtccccaggcggctgtcggcaataataatgccgagcgccaccagcaccgccagaataaggcgaatctgtaggctcgggccacggctaaaaattggcttcataagttatgcgtattctcgtatcagaccaggcagggtaaacagacacttcccctgcctgcatccgattactcttcgctgaacaggtcgccgccgtgcatgtcgatcatttccagcgctttgccgccaccgcgcgccacacaggtcagcgggtcttcagcaacaacgactggaatgccggtttcttccattaacaaacggtcaaggttacgcagcagtgcgccaccaccggtgagcaccatgccgcgctcggagatgtcggaagccagttccggcgggcactgttccagtgcaaccattaccgcgctcacaataccggtcagcggttcctgcagtgcttcgaggatttcattggagttcagggtaaaaccgcgtggaacaccttctgccaggttacggccacgaacttcgatttcacggacttcatcgcccggataagcgctaccgatttcgtgcttgatacgttctgcggtggcttcaccgatcagagaaccgtaattacgacgcacatagttgatgatagcttcgtcgaaacggtcaccaccaatgcgcacagaagaggagtaaaccacaccgttcaaggagataacagcaacttcagtggtaccaccaccgatatcaaccaccatagaaccggtcgcttcagaaaccggcaggccagcaccaattgcggcagccatcggttcttcaatcaggaagacttcacgggcaccagcgccctgcgcggattcacgaattgcgcggcgttcaacctgggtcgcgccaaccggcacacaaaccagaacgcgcgggcttggacgcataaagctgttgctgtgcacttgtttgatgaagtgctggagcattttttcagtcacgaagaagtcggcgataacgccgtctttcattgggcgaatggcagcaatattgcccggcgtacggcccagcatctgcttcgcgtcatgacctactgcagctacgcttttcggactaccggcacgatcctgacgaatggccaccacggaaggctcattcaatacgatgccttgtccttttacataaatgagggtattcgcagtacccaggtcaatggacaagtcattggaaaacatgccacgaaattttttcaacatactaagggataatcctgaaagctggggcggaaaagaaaatccgcttactttaccaaccacacgcagcagcgacaaggcgcaaaaatcatctgctacggtgaaaattagtgcagttcgtttcctttgttacaaatctctgcctgagtccagaaaggcttaatgcatcagcagcattcctcgcctgtttgcaaccgcgtaaggtcattcatctgcatatgtgctgcaacaatctggcgagcagacaagcacactcccatgagacgcagcgcgcattattctacgtgaaaacggattaaacggcaggttaaacgctgtatctttgactatattttttcacgttagtatcaagtggctgactggacgcgaaaaaatccccttgcccgcctgtaacaccgcgctgaatcagggtctgccactcgcttcggctacgcacgccggtggcgtaaacctgggtgctggtcccggagcaggcttccaccaggctttgaaccagcagctggttctccgttcgcttctcaatgtttctgaccagccccggatggagcttgagtaactcaacattaagttctttgatccaactggtacttaccagcgtcaaaccagcctggttgacggctacccgtacccctaaagcattcactaaacgaataacaggttgtaaacgactgatatgttgacctacatcggcctctgcaagttcaataattatgcgttttcgttgacttttttcacattgcattaacgtatcgcgcagccaacgctgaaaacgcgggcgaatcaggctctcaacggtaacctgaatcgccagattttcctctggccagtaacgcaatagtggaataagacggctgatttgcagacggtcatactcttcgcttaagccaaactgcaagaccatcggcatatactccgcgctgctaacctcttcattaccatcgaagatgcggcacatgagttcgcgatgatgaacctgaccttcgcgagtaaccgccggtttttgataaaggcgcgggccgccgcgactgagcatttgctcgataagcgtacgccagcgaacattaccgcgtcctttttcaggcaagctgtcatcgtaaatagcccagctattgccgccctgcaatcccgcattacgcgtggcagactctgcatgttccattacctgctcggtatcctgaccactacgccaggcgcagataccaatgtggatcatatcgtcgcgatcgagcattttattgttcggcaaggtatcaacggctttgattaactgaccggcgatgctctctgcctcttttaacgtccggtgcggtaacagcgcagcaaaatcactgcggtggtaacgcgccagcagtgcgccagggtagcgcatcataaatgtgctcagcagattcgtcagagtgaagaactgttcttcaacctggctgtgcccccaggtatcgctcaacatattgaaatccggcagacgaatcatcatcacgatcccgtgggtacctactttctcctgatcttccagtaacgttgctaactgattatcgaaaaagagtcggttattgaggccggttttcacgtcctgggcggcataagagcggatcagcgtatcaagacggctgtgttgttcgcgtgcgttctgaatttcacgaagcagcgtatccagcgcactgctggttctgggcggccattcatagatggttcccaacacattagagccacgctcaccgtttaagatacgagtagcccgggtttccagcaattcttgcccggcaagttgccgttgtaaccagcgtaccgccaggaagagcataacaatgataaagccaatcgcccccgtgagcggcgcggtggtcatcaagctatggaaatagttgcccatcggatcctgataaaccagacgcaagctcatccccggatgctttatcaacggaacgctcagttcgcgaaacagatcgctggagccaactggacgataactaccatttctggccagggtataaacctgtttatcaccatggagcaggtctacacgaacgatatctgcgctcatcattaattcggtaatttgtggccttaatacgctgaagtcattgctcacaaggtgggtatcaatcgccgtcgccaccgcctgaacgcgatgactaaacttatactgaatggcgttgtagaaacttaggctacagcccagcaaagtcacaaaaattgttaacccggtgagcagcgtaacaaaggcgctaaatttcgtcgttaatctcatccttgtgttaactccgatagtgaggaagcgggcatactagcaaatcagatttatctcgcaatttattgcgcttcatcggctttgcttttccattagcgagtatagtcttcagaaattattttccaatccatcatgcacatgaggaccacttatgcaggcgttacttttagaacagcaggacggcaaaactctcgcaagtgtacagactctggacgaaagtcgcctgccggagggcgatgtcacggtcgatgttcactggagcagcctgaactataaagatgcgctggcgattaccggtaagggaaaaatcatccgtaattttccgatgattcctgggatcgattttgccggaactgtacgcaccagcgaagatccgcgttttcatgccggtcaggaggtgttactcactggctggggcgttggtgaaaaccactggggtgggctggcggagcaggcgcgagtgaaaggtgactggctggttgccatgccgcaagggctggacgcgcgtaaagcaatgattatcggtactgccggttttaccgccatgctgtgtgtgatggcgctggaagatgccggtgttcgcccgcaggacggggagattgtcgtgacgggtgccagtggtggcgtcggcagtaccgccgtggcgctgctgcataagttgggttatcaggtcgttgccgtttccggtcgcgaaagtacccatgaatatctgaaaagtttaggtgctagccgtgttctccctcgtgatgagtttgccgaatcccgtcctctggaaaaacaagtctgggctggggcaattgacaccgttggcgacaaagtgctggcaaaagtgctggcgcaaatgaattacggcggctgcgtggcggcctgtggtctggcgggtggttttactctgccaaccacggtcatgccatttattctgcgtaatgtccgtttgcaaggggtggatagtgtaatgacgccaccagaacgccgcgcacaagcctggcagcgactggtcgccgatttaccggaaagtttctatacccaggcggcaaaagagatatctctgagtgaggcaccgaactttgccgaggccatcattaataaccagatccagggtcgcacgctggtgaaggttaactaaccatttagcagggaataataagagagggaactcattttgaaatcattattcaatcggttaacgggaaaagcggttagccggacagctttcgtcgaacaccttggtcaggaagttatacaacatcatccaaactggaaagtcatgatttcgactgaccacaaattgatgcgcattgatactccactaaacagctattattgatacgcctccgtcgcctgttaggtttatgttgctttgcctgggcgacgctacgcttagccccttacttatttctggtaccatggggtgaataatctgattttgtttgactacaaattaatcactcgaacctatttaatgctgagcattgtcaatcggttaattttgcgtgctttagcattcacatctatccagacgatgcagtgaaaattgggtaatccccagcaaccgctgcgtaatgtcgtctatcttgtcgcgatcctggcatccctacattatttgtggtctgtgaagattatctcattgcagcccctcatcttcgcagggctggcttttcagcttttcaccttacgttataagaagttccgtcgatgatggcgctaatttcgtgaattgtgcggcttgttgcaaattacacggtgttgaaggttatttacatgttagctgttgattatcttccctgataagaccagtatttagctgccaattgctacgaaatcgttataatgtgcgacctcgtcctccctgacgcagtttttgcgctgcggaaaaggtgacattggcgcaacgaaggtatattttgttttttgccggaggatagcagcagatcgctgcacaatgtccgtcaagtctaacattgacactctggggcaaaatagaccggcgtcccggcctgctggaatttatcgctatgcatacagctgtcggggcatacgctttacagacggcggtgaaacgcctgtcacaatcacactaaacaaagagtacggaacccactcatggatattcgtaagattaaaaaactgatcgagctggttgaagaaagtggcatctccgaactggaaatttctgaaggcgaagagagtgtacgcattagccgtgcagctcctgccgcaagtttccctgtgatgcaacaagcttacgctgcaccaatgatgcagcagccagctcaatctaacgcagccgctccggcgaccgttccttccatggaagcgccagcagcagcggaaatcagtggtcacatcgtacgttccccgatggttggtactttctaccgcaccccaagcccggacgcaaaagcgttcatcgaagtgggtcagaaagtcaacgtgggcgataccctgtgcatcgttgaagccatgaaaatgatgaaccagatcgaagcggacaaatccggtaccgtgaaagcaattctggtcgaaagtggacaaccggtagaatttgacgagccgctggtcgtcatcgagtaacgaggcgaacatgctggataaaattgttattgccaaccgcggcgagattgcattgcgtattcttcgtgcctgtaaagaactgggcatcaagactgtcgctgtgcactccagcgcggatcgcgatctaaaacacgtattactggcagatgaaacggtctgtattggccctgctccgagtgtaaaaagttatctgaacatcccggcaatcatcagcgccgctgaaatcaccggcgcagtagcaatccatccgggttacggcttcctctccgagaacgccaactttgccgagcaggttgaacgctccggctttatcttcattggcccgaaagcagaaaccattcgcctgatgggcgacaaagtatccgcaatcgcggcgatgaaaaaagcgggcgtcccttgcgtaccgggttctgacggcccgctgggcgacgatatggataaaaaccgtgccattgctaaacgcattggttatccggtgattatcaaagcctccggcggcggcggcggtcgcggtatgcgcgtagtgcgcggcgacgctgaactggcacaatccatctccatgacccgtgcggaagcgaaagctgctttcagcaacgatatggtttacatggagaaatacctggaaaatcctcgccacgtcgagattcaggtactggctgacggtcagggcaacgctatctatctggcggaacgtgactgctccatgcaacgccgccaccagaaagtggtcgaagaagcgccagcaccgggcattaccccggaactgcgtcgctacatcggcgaacgttgcgctaaagcgtgtgttgatatcggctatcgcggtgcaggtactttcgagttcctgttcgaaaacggcgagttctatttcatcgaaatgaacacccgtattcaggtagaacacccggttacagaaatgatcaccggcgttgacctgatcaaagaacagctgcgtatcgctgccggtcaaccgctgagcatcaagcaagaagaagttcacgttcgcggccatgcggtggaatgtcgtatcaacgccgaagatccgaacaccttcctgccaagtccgggcaaaatcacccgtttccacgcacctggcggttttggcgtacgttgggagtctcatatctacgcgggctacaccgtaccgccgtactatgacagtatgatcggtaagctgatttgctacggtgaaaaccgtgacgtggcgattgcccgcatgaagaatgcgctgcaggagctgatcatcgacggtatcaaaaccaacgttgatctgcagatccgcatcatgaatgacgagaacttccagcatggtggcactaacatccactatctggagaaaaaactcggtcttcaggaaaaataagactgctaaagcgtcaaaaggccggattttccggccttttttattactggggatcgacaacccccataaggtacaatccccgctttcttcacccatcagggacaaaaaatggacactcgttttgttcaggcccataaagaggcgcgctgggcgctggggctgacccttttgtatctggcagtttggttagtagccgcttacttatctggcgttgcccccggttttaccggctttccgcgctggtttgagatggcctgcatcctgacgccgctgctgtttattggactgtgctgggcgatggtgaaatttatctatcgcgatatcccactggaggatgacgatgcagcttgaagtaattctaccgctggtcgcctatctggtggtggtgttcggtatcagcgtttatgcgatgcgtaaacggagcaccggcaccttccttaatgagtatttcctcggcagccgctctatgggcggtattgtgctggcgatgacgctcaccgcgacctatatcagtgccagtagctttatcggcgggccaggagctgcttataaatacgggctgggctgggtattgctggcgatgattcagcttcctgcagtctggcttagtctcggtattctcggcaagaagtttgcgattcttgcgcgccgctacaatgcagtgacgctgaacgatatgctgtttgcccgctaccagagtcgtcttctggtgtggctggcgagtttgagtttgctggttgcgttcgttggtgcgatgaccgtgcagtttatcggcggtgcgcgcctgctggaaaccgcggcgggtattccttatgaaaccgggctgctgatttttggtatcagcattgcgttatataccgcctttggtggctttcgcgccagcgtgctgaacgacaccatgcaagggcttgtgatgctgattggcaccgttgtgctgcttattggcgtagtacatgccgctggcggcttaagtaacgcagtacagaccttgcaaaccatcgatccgcaactggttacgccacaaggcgctgacgatattctgagccctgcctttatgacgagcttctgggtactggtgtgttttggcgtgattggcctgccgcatactgcggtgcgctgtatctcttataaagacagcaaagccgtacatcgggggatcatcatcggtacgattgtggtcgcaattctgatgttcggtatgcacctggccggagcgttaggtcgggcggtgatccccgatctcaccgtaccggacctggtgatcccaacgttaatggtaaaagtgctgccaccgtttgctgccgggatcttcctggctgcaccgatggctgcgatcatgagcacaattaacgcccaactgctgcaaagttccgctacgatcattaaagatctctatctgaatatccgtccggatcaaatgcaaaacgagacgcgtctgaagcggatgagcgcggtaattacgttagttctcggcgcgttgctgctgcttgccgcctggaagccgccagaaatgatcatctggctgaatttgttggccttcggtgggctggaagccgttttcctgtggccgctggtgctgggtctttactgggaacgcgccaacgccaaaggcgcgctaagtgcgatgatcgttggcggcgtgctgtatgccgtactcgcgacgctgaatattcagtacctgggcttccaccctatcgtgcccagcttactactaagtttgctggctttcctggtcggaaaccgtttcggtacatccgtcccgcaagctaccgttttgactactgataaataaagagttttgccatgccttggatccaactgaaactgaacaccaccggcgcgaacgcggaagatcttagcgatgcgctgatggaagcgggtgccgtttctatcacttttcaggatacccacgatacgccagtatttgaaccgctgccgggcgaaacgcgcctgtggggcgacaccgatgtgattggtctgttcgacgctgaaaccgatatgaacgacgtggtggcgattctggaaaaccatccgctgctcggcgcaggcttcgcgcataaaatcgaacaactagaagataaagactgggagcgcgaatggatggataatttccacccgatgcgctttggtgaacgactgtggatctgccctagctggcgtgatgtgccggacgaaaacgccgtcaacgtgatgttagatccagggctggcgtttggtacgggtacccatccaaccacctctctgtgcctgcaatggctcgacagcctcgatttaaccggtaaaacagtcatcgactttggctgtggttccggcattctggcgatcgcggcgctgaaactgggtgcagcaaaagccattggtattgatatcgatccgcaggcgattcaggccagccgcgataacgccgaacgtaatggcgtttctgaccgtctggaactctacttaccgaaagatcagccagaagaaatgaaagccgacgtggtggtcgctaacatccttgcaggcccattacgtgaactggcaccgttaatcagcgtcctgccggttagtggcggtttgctgggcctttccggtattctggcaagccaggcagagagcgtttgtgaagcttatgccgatagcttcgcactggacccggtcgtggaaaaagaagagtggtgccgtattaccggtcgtaagaattaaccttcgcatcgccgtagggtgacgcggggcgaagtgcgagcaagctcacaaaaggcacgtaaatttgccgattatttacgcaaatttgcgtgccaaaattttcattcataaagaaaaattgagaacttactcaaatttctttgagtgtaaattttagtcactattttctaatatgatgatttttatgagtaattatcgcaccacgctcattttaaatgcaattctttgatccatctcagaggattggtcaaagtttggcctttcatctcgtgcaaaaaatgcgtaatatacgccgccttgcagtcacagtatggtcatttcttaactcatgcgcatcggacaatatcagctcagaaatcgcctgatcgcagcgcccatggctggcattacagacagaccttttcggacgttgtgctacgagatgggagccggattgacagtatccgagatgatgtcttctaacccacaggtttgggaaagcgacaaatctcgtttacggatggtgcacattgatgaacccggtattcgcaccgtgcaaattgctggtagcgatccgaaagaaatggcagatgcagcacgtattaacgtggaaagcggtgcccagattattgatatcaatatgggttgcccggctaaaaaagtgaatcgcaagctcgcaggtagtgccctcttgcagtacccggatgtcgttaaaagcatccttaccgaggtcgtcaatgcagtggacgttcctgttaccctgaagattcgcaccggctgggcaccggaacaccgtaactgcgaagagattgcccaactggctgaagactgtggcattcaggctctgaccattcatggccgtacacgcgcctgtttgttcaatggagaagctgagtacgacagtattcgggcagttaagcagaaagtttccattccggttatcgcgaatggcgacattactgacccgcttaaagccagagctgtgctcgactatacaggggcggatgccctgatgataggccgcgcagctcagggaagaccctggatctttcgggaaatccagcattatctggacactggggagttgctgcccccgctgcctttggcagaggttaagcgcttgctttgcgcgcacgttcgggaactgcatgacttttatggtccggcaaaagggtaccgaattgcacgtaaacacgtttcctggtatctccaggaacacgctccaaatgaccagtttcggcgcacattcaacgccattgaggatgccagcgaacagctggaggcgttggaggcatacttcgaaaattttgcgtaaacagaaataaagagctgacagaactatgttcgaacaacgcgtaaattctgacgtactgaccgtttctaccgttaactctcaggatcaggtaacccaaaaacccctgcgtgacagcgttaaacaggcactgaagaactattttgctcaactgaatggtcaggatgtgaatgacctctatgagctggtactggctgaagtagaacagcccctgttggacatggtgatgcaatacacccgtggtaaccagacccgtgctgcgctgatgatgggcatcaaccgtggtacgctgcgtaaaaaattgaaaaaatacggcatgaactaattcaggttagctaaatgcttgattaaaaaggcgctactcggcatggggaagcgccttttttataggtgtcacaaagggagtgaccatgagaacaggatgtgaaccgacccggtttggtaatgaagctaagaccattattcacggtgatgcgcttgccgaacttaaaaagatccccgccgaaagtgtcgatctgatctttgccgacccaccatataacatcggtaaaaattttgatggtctgatcgaagcctggaaagaagatctgtttatcgactggctgtttgaagtgattgcagagtgccaccgcgttctgaaaaagcagggcagcatgtacatcatgaacagtacggaaaacatgccctttatcgatctccagtgccgcaagctttttaccatcaaaagtcgcatcgtctggagttatgacagttctggagtgcaggcgaaaaaacactacggctccatgtacgaacccatcctgatgatggtgaaagacgcaaagaactacacattcaacggtgatgctattctggtagaagccaaaaccggaagccagcgcgcgttgatcgattatcgcaaaaatcctccacagccttacaatcatcaaaaagtaccgggtaacgtttgggattttccgcgcgtgcgttatttgatggatgaatatgaaaaccacccgacgcaaaaaccggaagccttactgaaacgcattattctcgcctcttccaacccaggcgatatcgttctcgacccgtttgctggtagctttactaccggtgccgtagccatcgccagcggacgaaaattcattggtattgagatcaacagcgagtacatcaaaatggggcttcgacggctggatgtcgcgagccattactctgcggaagaactggcgaaagtgaaaaaaagaaagaccggcaacctgagtaaacgaagccggttaagcgaagttgaccccgatctcattacaaagtaaaggatgtgtaagcctggttttcagattattcatttcgtgtatatttcctgccagacttggttaaacatgcacaggctcaggtaatgattcgcaagtattggtggctcgtcgttttcgctgtcttcgtttttctgtttgatactttactgatgcagtggattgaactgctggcaacagaaacagacaaatgccgcaatatgaacagtgttaatccactaaaactggttaactgtgacgaactgaattttcaggacagaatgtgaatttacatgacacttaattcattcgtttgatgaattaatttcgttatgttttcatctggcatgaacattcttaatacgttatcgaccagagcgggggcttgtttataaagatcataacccgccatattcattaaccagttttgaacaattccgctgaaggcaccatcaataataatcatcacaacatctaaatcgaggttatttgctacacaaccttgttgctgacacgcctgcaatacttcgcggagagtctgcggattaaagcccatcttttcgcgtatcactccctcggccagcatctcatcattaaattcacatttgtgatataagattttcagcaacgcctgctggcggggaattttggcaatatattgcaagccgacaatcaatttttcacgcaattgttgaaacgggtcatgctctaatccagccgtcaagtgttcctggattaactcccgcaaactaggctgttgcaaccacatctcattaaacagttgagtcttgttttcgaagtgccagtagatagcgccacgcgtaacgttagcggcgtcggcaatgtcgttgagcgtcgtcttgcttacgccatgctgcgcaaactgggcgatggcagtttcaatcagttcttgccgggtcttcagagcttcggctttggttctttttgccatgattaattattcaggaaataaatatattcgacacagagtgagaaaatagcgaaggttaatctatcacctaatgtgtatttatacgagaggctaatattgagttgctataaatcgttaaataaataatatatattatttacctaagatacattcactacatcaatatatatttcaatttacgaggttttaattctgcctctttcaacccgcgtcaaaataaaacagtagaatattaatctttttttgtgtttatgtgccttgagatgcctgtattcataactattccttacatcgacgaatgataatttgtaggatagcgaactgtatttttctttctgcgagttaacgcgttgcctttttgggtaaataacgcgcttttggttttttgaggaatagtaatgacgaaacatgccaggtttttcctcctgccctcctttattctgatctccgcggctttaatcgccggttgtaacgataagggagaagagaaagctcacgtcggtgaaccgcaggttaccgttcatattgtaaaaacggccccgttagaagttaagactgaattaccaggccgcaccaatgcttatcgtatagccgaagttcgcccacaggttagcgggatcgtactgaatcgcaatttcactgaaggcagcgatgtgcaagcaggccagtccctgtaccagatcgatcccgcgacctatcaggcaaattatgacagcgcgaaaggcgaactggcgaaaagtgaagccgccgccgccatcgcgcatttgacggtaaaacgttacgttccgctcgtgggtacgaaatacatcagccagcaggagtacgaccaggccattgctgatgctcgtcaggccgatgccgccgtgattgccgcaaaagccacagtcgaaagcgctcgcatcaatcttgcttataccaaagtcactgcgccaattagcggacgtatcggcaaaagcactgtgaccgaaggcgctcttgtcactaatgggcaaacgactgaactggcgactgtccagcagctcgatcctatctacgttgatgtgacccaatccagcaacgattttatgaggctgaagcaatccgtagagcaaggaaatttgcataaggaaaacgccaccagcaacgtagagttggtcatggaaaacggtcaaacctatcccctgaaaggtacgctgcaattctccgatgtgaccgttgatgaaagcaccggctccataaccctacgtgctgtcttccctaacccgcaacatacgcttttgccgggtatgtttgtgcgtgcacggattgatgaaggcgtccaacctgacgccattcttatcccgcaacaaggcgttagccgcacaccgcgtggtgatgcaaccgtgctgattgttaacgataaaagtcaggttgaagcgcgccctgtcgttgccagtcaggcgattggcgataaatggttgattagtgaaggactgaaatctggcgatcaagtcattgtcagcggcctgcaaaaagcgcgtccgggagagcaggttaaagccactaccgatacccccgcagatactgcaagcaagtaaggtaatctgacatggcaaacttttttattcgacgaccgatatttgcatgggtgctggccattattctgatgatggcgggcgcactggcgatcctacaattgcccgtcgctcagtatccaacaattgcaccgcctgcggtttctgttagtgcaaactatccgggcgctgatgcgcagaccgtgcaggatacggtgacgcaggttatcgaacagaatatgaacggtatcgataacctgatgtatatgtcctccaccagcgattccgccggtagcgtgacaattacccttaccttccagtccgggaccgatcctgatatcgcgcaagtgcaggtgcagaacaaactccagctcgccacgccgttgctgccgcaggaggttcagcagcaggggatcagtgttgaaaagtccagtagcagctatttgatggtggcgggctttgtctctgataacccaggcaccacacaggacgatatcagcgactatgtggcctctaacgttaaagatacgcttagccgtctgaatggcgtcggtgacgtacagcttttcggcgcacagtatgcgatgcgtatctggctggatgccgatctgctaaacaaatataaactgacaccggttgatgtgattaaccagttgaaggtacagaacgatcagatcgctgccggacagttgggcggaacgccagcgttaccagggcaacaattgaacgccagcattattgctcagacgcggtttaaaaatccggaagaattcggcaaagtgaccctgcgcgtaaacagtgacggcagcgtggtacgcctgaaagatgtcgcacgggttgaacttggcggtgaaaactataacgttatcgctcgtatcaacggaaaaccggcggcgggcctggggattaagctggcaaccggcgcgaatgctctcgataccgcgaaagccattaaggcaaaactggcggaattacagccattcttcccgcagggaatgaaggttctctacccttatgacaccacgccattcgtccagctttctattcacgaagtggtaaaaacgctgttcgaagccattatgctggtgttcctggtgatgtatctgttcttgcagaatatgcgagcaacgctgatccccgccattgcggtacccgtggtgttgttagggacgtttgccatcctcgccgcttttggttactccatcaacacactaacgatgttcgggatggtgcttgccatcgggctgctcgtcgatgatgcgatagtggtggtggagaacgtcgagcgcgtgatgatggaggataagctcccgccaaaagaagcgacggaaaaaagcatgagccaaattcagggcgcactggtgggtatcgcgatggtgctgagtgcggtatttattccgatggcattcttcggcggttctactggggcaatttatcgccagttctctatcaccatcgttagcgcaatggcgctttctgttctggtggcattgattcttacccctgcgttatgtgcaacgctgcttaaacccgtctctgctgagcatcacgaaaataagggcggtttcttcggttggtttaataccaccttcgatcatagcgttaaccactacaccaacagcgtcggcaaaatcctcggatccacaggacgatatttactgatctatgcgctgattgttgcaggaatggtggtgttgtttttacgtcttccgtcttccttcttacctgaagaggatcagggtgtctttctgaccatgattcagttacccgctggcgcgacgcaagagcggacgcaaaaagtgttggatcaagttacggattactatctgaagaacgagaaagcgaacgttgaaagtgtctttacggttaacggctttagcttcagcggccaggcacaaaacgccggtatggccttcgtcagtctgaaaccgtgggaagagcgtaatggtgacgaaaacagtgcggaagcggtaatccatcgtgccaaaatggaattgggcaagatccgcgacggttttgtcattccattcaatatgccagccattgttgaactgggcacggcaacgggtttcgactttgagttaattgatcaggctgggctgggtcacgatgccctaacccaggcccgtaaccagttgcttggtatggcggcgcaacatcctgccagcttagtcagcgtgcgccctaatggcctggaagacaccgcgcagtttaaactggaagttgaccaggaaaaggcgcaggcattaggtgttagtctttctgacatcaatcagaccattagtacggcgctgggtgggacttacgttaacgacttcatcgaccgtggccgcgtgaaaaagttgtatgttcaggcggatgccaaattccgtatgctgccagaagatgtcgataaactttatgtccgcagcgccaacggcgaaatggtgccattcagcgcctttaccactagtcattgggtgtatggctctccgcgactggaacgctacaacggtctgccgagtatggagattcagggggaagccgcgccaggaaccagttccggcgatgccatggcgttgatggaaaaccttgcgagtaaattacctgcgggcattggttatgactggacgggtatgagctatcaggaacgcttaagcggaaaccaggctcccgctctggtagcaatttcctttgtggttgttttcctgtgccttgctgcactctatgaaagctggagtattcctgtcagcgttatgttggtagtgccgttagggattgtcggcgtgctgctggcggcgacactctttaatcaaaaaaatgacgtctactttatggtgggcttgctaacgacaattggcttgagcgccaaaaacgctattttgatcgttgagttcgctaaagatctcatggagaaagagggtaaaggtgttgttgaagcgacactgatggcagtacgtatgcgtctgcgtcctatcctgatgacctctctcgcctttattctcggcgtattaccgctagctatcagtaacggtgccggcagtggcgcgcagaacgctgtgggtatcggggtaatgggaggaatggtctctgcaacgttgctggcaatcttcttcgtaccggtgttctttgtggtgatccgccgttgctttaaaggataaatcagaaacataaaggcgctttcgggtgcctttattatttccagtgaaacccataaaaattaataagatattcttctgctcactctttaaaagctttctatagttcccgctcccttcactatttttacaattcacataatttgtcattattcattccgcaagatttataacctccggtgataaaatggcattcagctcgttaataagagagttaacttattaagcgttagcgtttattactgaggtaacaccatgaaaagattaattcctgtggcattgctcaccgcattgctggcgggctgtgctcacgatagcccctgcgttccggtttatgacgatcagggtcgtctggttcacaccaatacctgtatgaaaggcacgactcaggataactgggaaacggctggggctattgccggcggggcagctgctgttgctggcctgacgatggggatcatcgctctaagcaaataactgaacagggcgcggagttccgcgctctttttaacgatacagtatctctccataagataaaatattgctatattctgctgggtaattccctgctgatttagcatgttacatcgcgttatttcgctgctttcgaaataacgcatcaatttaattttcacacttcccaccagaaatatactcacgctaacaatcattattctgcttagtaaaacacgcgtaaatattttgcgccaaaatgtggcgcatgtttcattttcgcaccattgcggggcgctgtttttattatttcctgtctacactcagcttattgcgacgcgaaatcgtgcgcaaaagctggcactacttttgcttataagaggatggccacagacaggtaaaagacgtttcccaaacgtcctataacgataattttcgcctcacaggaagcattatgaaaaagatgatgatagccacactggctgccgccagcgtgctgcttgccgttgcaaatcaggcgctgctggcgcgacgcttgatgccgttcagaaaaaaggttttgtgcaatgcgggatcagtgatggattacctgggttctcttatgccgatgctgacggtaagtttagtggtattgatgttgatatttgtcgtggtgttgccgctgctgtatttggtgacgacacgaaagtgaaatataccccgctcactgcaaaagaacgcttcaccgctttacagagtggggaggtggatttgctctcccgtaatacgacctggactagttctcgcgatgccgggatgggaatggcatttaccggcgtcacttattacgacggcattggcttcctgacgcacgataaagcggggctaaaaagcgcgaaagaactggatggcgctaccgtctgtattcaggcgggtactgataccgaactcaacgtcgccgactacttcaaggcaaacaatatgaagtacacaccggtgactttcgatcgctctgacgaaagtgcgaaggcactggaatctggtcgctgcgatacgctggccagcgatcaaagtcaactgtatgccctgcgcatcaaattaagcaacccagctgaatggattgtcttaccggaagttatcagtaaagaaccgcttggtccggtagttcgtcgtggcgatgatgaatggttcagcattgtacgctggacgcttttcgccatgctgaatgctgaagagatgggcatcaattcccagaacgtcgatgaaaaagcggctaatccagcaacgcctgatatggcacatctgctgggtaaagaaggcgattacggcaaggatctgaagctggataataaatgggcctataacatcatcaaacaggtgggtaactacagcgaaatttttgagcgtaacgtaggtagtgaaagcccgctgaaaattaaacgtgggcaaaataatctctggaataacggcggtattcagtacgcaccgcccgtgcgttaagtcggtgtgaggtaacgagcgtcgctacggcggcgctctcttcagcgttatgctttccgaggtttctatgtctcatcgccgcagtaccgttaaaggcagtctctcttttgccaaccctacggttcgcgcctggttattccagatccttgccgttgttgctgttgtcggcattgttggttggttatttcacaacactgtaacgaatctcaataatcgtggcattactagtggttttgcctttctggatcgcggcgctggcttcggtattgtccagcatttgatcgattaccagcagggcgacacctacggacgcgtttttattgtcggcttactcaatacgctactggtttctgcattgtgtattgtgttcgcttctgttttgggcttctttatcggtctggcgagacttagcgataactggctgctacgaaagctttccacaatttatattgagatcttccgtaatattcccccgctgctgcaaatcttcttctggtactttgccgtgttgcgcaatttgcccggaccacgccaggctgtgagcgcgtttgatctggcctttttgagcaatcgtgggctttatattccgagtccgcagctgggagacggatttattgcgtttatcctggctgttgttatggctatagtcctttctgttgggctattccgctttaataaaacataccagataaagaccggacaactgcgccgcacctggccgatcgccgcagtgttgatcattggtttgcctttactggcgcaatggctttttggcgcagcactacactgggatgtcccagccctacgaggctttaacttccgcggcgggatggttttaattcctgaactggcagccttaacgctggcacttagcgtttatacatctgcatttatcgccgagattatccgcgctgggatccaggcagtgccttatggtcaacatgaagcggctcggagtctgggattacccaacccggttacgctacgccaggtcattattccccaggcattgcgggtgattattccaccgttaaccagccagtatctcaacatcgtcaaaaactcctctcttgccgccgctattggctatcccgatatggttagcctgtttgccggcaccgtgctgaatcagacggggcaagccatcgagacgatagccatgaccatgagcgtctatctgattatcagcctgactatcagcctgctgatgaatatctataaccgccgcatcgcgatcgttgaacgctaaggagtcatgatgacaaaagtattgctgtctcatcccccgcgcccggcgagccataacagtagccgcgcgatggtgtgggtgcgaaaaaatctgttctccagctggagcaatagcctgctgactattggctgcatatggttgatgtgggaactgatcccaccgttgctgaactgggcatttttgcaggctaactgggttggcagtacgcgtgccgactgcacaaaagccggtgcctgttgggtcttcatccacgaacgatttggtcagtttatgtatgggctttacccacacgaccaacgctggcgaattaacctcgcattactgattgggcttgtgagcatcgcaccaatgttctggaaaatactcccgcatcgcggtcgctatattgcggcctgggcggtgatttacccactgattgtctggtggctgatgtatggcggtttttttgctcttgagcgggttgaaacccggcaatggggcgggctgacgctaactttaattattgcaagtgttgggattgcgggggcgctaccgtgggggatcttactggcgttaggtcgccgctcccatatgccgattgtgcgtatcttaagcgtcatttttatcgaattctggcgcggcgtgccgctgattaccgttctgtttatgtctagcgtcatgctgccgttgtttatggcagaaggcaccagtatcgacaaattgatccgcgcgctggttggcgtgatcctgtttcagagtgcatatgttgcggaagtcgtgcgaggtggattacaggcgctgcctaaagggcaatatgaagcggcagagagcctggcgttgggttactggaaaactcaggggctggttattctgccacaggcgttgaagctggtaattcctgggctggtaaataccatcatcgcactcttcaaagataccagcctggtgatcattatcgggttgttcgatcttttcagtagcgttcagcaggcaaccgttgatcccgcctggttgggtatgagcacggaagggtatgttttcgccgcgctgatctactggatcttctgtttcagcatgagccgctatagccagtatctggaaaaacgttttaacaccgggcgtacaccgcattgaggacactatgagccaaattttactgcaacctgctaacgcgatgattacgctggaaaacgtcaataaatggtatggacaattccatgttttgaaaaatataaatttaaccgtgcaaccgggagaacggatcgttctgtgtggccctagtggttccggtaaaagcacaaccattcgttgtattaatcatctggaagaacatcaacagggacggatcgtggtagatggcatcgaacttaatgaagatatccgcaatattgagcgcgtcaggcaggaagtgggaatggtctttcagcatttcaatctcttccctcatctgaccgttttacagaactgtaccctggcaccgatttgggtacgcaagatgcctaagaaagaggctgaagatctggcggtgcattacctagagcgggtgagaattgccgaacatgcgcataagtttcccggacagattagtggtggtcagcagcaacgcgttgccattgcgcgtagcctgtgtatgaagccgaaaattatgttgtttgatgagccaacgagcgcgctcgatcctgagatggtgaaagaggtgctggatacgatgattgggctggcgcagagcggtatgacaatgttgtgtgtaacacatgagatggggtttgcacgaaccgtcgctgaccgggtaatttttatggatcgtggggaaatagtggagcaagctgcacctgatgaattttttgcgcatcctaaaagtgagcgtacgagggcatttttaagccaggtaatccattaattgaatgttagttcgaaaagcaaaaaggccatcctttcggatggcctttcgcttgatttgatgtctggcagtttatggcgggcgtcctgcccgccaccctccgggccgttgcttcgcaacgttcaaatccgctcccggcggatttgtcctactcgggagagtgttcaccgacaaacaacagataaaacaaaaggcccagtcttccgactgagccttttgttttatttgatgtctggcagttccctactctcgcatggggagaccccacactaccatcggcgctacggcgtttcacttctgagttcggcatggggtcaggtgggaccaccgcgctactgccgccagacaaattcttttctaatctgccgaactttaacctaaaaagtggtgctgatacccagagtcgaactggggacctcacccttaccaagggtgcgctctaccaactgagccatatcagcacgctaaatttgatgcctggcagttccctactctcgcatggggagaccccacactaccatcggcgctacggcgtttcacttctgagttcggcatggggtcaggtgggaccaccgcgctacggccgccaggcaaattctgttttatcagaccgcttctgcgttctgatttaatctgtatcaggctgaaaatcttctctcatccgccaaaacagcttcggcgttgtaaggttaagcctcacggttcattagtaccggttagctcaacgcatcgctgcgcttacacacccggcctatcaacgtcgtcgtcttcaacgttccttcaggacccttaaagggtcagggagaactcatctcggggcaagtttcgtgcttagatgctttcagcacttatctcttccgcatttagctaccgggcagtgccattggcatgacaacccgaacaccagtgatgcgtccactccggtcctctcgtactaggagcagcccccctcagttctccagcgcccacggcagatagggaccgaactgtctcacgacgttctaaacccagctcgcgtaccactttaaatggcgaacagccatacccttgggacctacttcagccccaggatgtgatgagccgacatcgaggtgccaaacaccgccgtcgatatgaactcttgggcggtatcagcctgttatccccggagtaccttttatccgttgagcgatggcccttccattcagaaccaccggatcactatgacctgctttcgcacctgctcgcgccgtcacgctcgcagtcaagctggcttatgccattgcactaacctcctgatgtccgaccaggattagccaaccttcgtgctcctccgttactctttaggaggagaccgccccagtcaaactacccaccagacactgtccgcaacccggattacgggtcaacgttagaacatcaaacattaaagggtggtatttcaaggtcggctccatgcagactggcgtccacacttcaaagcctcccacctatcctacacatcaaggctcaatgttcagtgtcaagctatagtaaaggttcacggggtctttccgtcttgccgcgggtacactgcatcttcacagcgagttcaatttcactgagtctcgggtggagacagcctggccatcattacgccattcgtgcaggtcggaacttacccgacaaggaatttcgctaccttaggaccgttatagttacggccgccgtttaccggggcttcgatcaagagcttcgcttgcgctaaccccatcaattaaccttccggcaccgggcaggcgtcacaccgtatacgtccactttcgtgtttgcacagtgctgtgtttttaataaacagttgcagccagctggtatcttcgactgatttcagctccacgagcaagtcgcttcacctacatatcagcgtgccttctcccgaagttacggcaccattttgcctagttccttcacccgagttctctcaagcgccttggtattctctacctgaccacctgtgtcggtttggggtacgatttgatgttacctgatgcttagaggcttttcctggaagcagggcatttgttgcttcagcaccgtagtgcctcgtcatcacgcctcagccttgattttccggatttgcctggaaaaccagcctacacgcttaaaccgggacaaccgtcgcccggccaacatagccttctccgtccccccttcgcagtaacaccaagtacaggaatattaacctgtttcccatcgactacgcctttcggcctcgccttaggggtcgactcaccctgccccgattaacgttggacaggaacccttggtcttccggcgagcgggcttttcacccgctttatcgttacttatgtcagcattcgcacttctgatacctccagcatgcctcacagcacaccttcgcaggcttacagaacgctcccctacccaacaacgcataagcgtcgctgccgcagcttcggtgcatggtttagccccgttacatcttccgcgcaggccgactcgaccagtgagctattacgctttctttaaatgatggctgcttctaagccaacatcctggctgtctgggccttcccacatcgtttcccacttaaccatgactttgggaccttagctggcggtctgggttgtttccctcttcacgacggacgttagcacccgccgtgtgtctcccgtgataacattctccggtattcgcagtttgcatcgggttggtaagtcgggatgacccccttgccgaaacagtgctctacccccggagatgaattcacgaggcgctacctaaatagctttcggggagaaccagctatctcccggtttgattggcctttcacccccagccacaagtcatccgctaatttttcaacattagtcggttcggtcctccagttagtgttacccaaccttcaacctgcccatggctagatcaccgggtttcgggtctataccctgcaacttaacgcccagttaagactcggtttcccttcggctcccctattcggttaaccttgctacagaatataagtcgctgacccattatacaaaaggtacgcagtcacacgcctaagcgtgctcccactgcttgtacgtacacggtttcaggttctttttcactcccctcgccggggttcttttcgcctttccctcacggtactggttcactatcggtcagtcaggagtatttagccttggaggatggtccccccatattcagacaggataccacgtgtcccgccctactcatcgagctcacagcatgtgcatttttgtgtacggggctgtcaccctgtatcgcgcgcctttccagacgcttccactaacacacacactgattcaggctctgggctgctccccgttcgctcgccgctactgggggaatctcggttgatttcttttcctcggggtacttagatgtttcagttcccccggttcgcctcattaacctatggattcagttaatgatagtgtgtcgaaacacactgggtttccccattcggaaatcgccggttataacggttcatatcaccttaccgacgcttatcgcagattagcacgtccttcatcgcctctgactgccagggcatccaccgtgtacgcttagtcgcttaacctcacaacccgaagatgtttcacttcagagttgcgaaaatttgagagactcacgaacaactttcgttgttcagtgtttcaattttcagcttgatccagatttttaaagagcaaaacttcgcagtgaacctttgcaggtacactctgaagtattttttatttaatcactacagagatggtggagctatgcgggatcgaaccgcagacctcctgcgtgcaaagcaggcgctctcccagctgagctatagccccataacatgtagttaaaacctcttcaaatttgccgtgcaaatttggtaggcctgagtggacttgaaccaccgacctcacccttatcaggggtgcgctctaaccacctgagctacaagcctgtagaggttttactgctcattttcatcagacaatctgtgtgagcactgcaaagtacgcttctttaaggtaaggaggtgatccaaccgcaggttcccctacggttaccttgttacgacttcaccccagtcatgaatcacaaagtggtaagcgccctcccgaaggttaagctacctacttcttttgcaacccactcccatggtgtgacgggcggtgtgtacaaggcccgggaacgtattcaccgtggcattctgatccacgattactagcgattccgacttcatggagtcgagttgcagactccaatccggactacgacgcactttatgaggtccgcttgctctcgcgaggtcgcttctctttgtatgcgccattgtagcacgtgtgtagccctggtcgtaagggccatgatgacttgacgtcatccccaccttcctccagtttatcactggcagtctcctttgagttcccggccggaccgctggcaacaaaggataagggttgcgctcgttgcgggacttaacccaacatttcacaacacgagctgacgacagccatgcagcacctgtctcacggttcccgaaggcacattctcatctctgaaaacttccgtggatgtcaagaccaggtaaggttcttcgcgttgcatcgaattaaaccacatgctccaccgcttgtgcgggcccccgtcaattcatttgagttttaaccttgcggccgtactccccaggcggtcgacttaacgcgttagctccggaagccacgcctcaagggcacaacctccaagtcgacatcgtttacggcgtggactaccagggtatctaatcctgtttgctccccacgctttcgcacctgagcgtcagtcttcgtccagggggccgccttcgccaccggtattcctccagatctctacgcatttcaccgctacacctggaattctacccccctctacgagactcaagcttgccagtatcagatgcagttcccaggttgagcccggggatttcacatctgacttaacaaaccgcctgcgtgcgctttacgcccagtaattccgattaacgcttgcaccctccgtattaccgcggctgctggcacggagttagccggtgcttcttctgcgggtaacgtcaatgagcaaaggtattaactttactcccttcctccccgctgaaagtactttacaacccgaaggccttcttcatacacgcggcatggctgcatcaggcttgcgcccattgtgcaatattccccactgctgcctcccgtaggagtctggaccgtgtctcagttccagtgtggctggtcatcctctcagaccagctagggatcgtcgccttggtgagccgttaccccaccaacaagctaatcccatctgggcacatccgatggcaagaggcccgagggtccccctctttggtcttgcgacgttatgcggtattagctaccgtttccagtagttatccccctccatcaggcagtttcccagacattactcacccgtccgccactcgtcagcgaaacagcaagctgtttcctgttaccgttcgacttgcatgtgttaggcctgccgccagcgttcaatctgagccatgatcaaactcttcaatttaaaagtttgatgctcaaagaattaaacttcgtaatgaattacgtgttcactcttgagacttggtattcatttttcgtcttgcgacgttaagaatccgtatcttcgagtgcccacacagattgtctgataaattgttaaagagcagttgcgacgcggctttcagctcactgtcgcgaggtggcgtatattacgctttcctctttcagagtcaaccctgaatttcaggatttttttctcttcgttgttccgaccatcctgtgaagtgtttcacgttgtcgtctcaacggaggcgcattatagggatcccaattttttgcacaagtatttttttgatctttttttctgtttgttgttttttcaccctttttgctgcaatcgcacacaaaacggtgcttttttgcatactaaaagacttgcacaaggccaataatgcccccaaagtcattagtaaatcatttattgctgaggtaagtatgtctgatgttttacgcccataccgcgatctttttccacaaatcggtcagcgcgtaatgatcgacgatagcagtgtcgtgattggtgacgttcgtctggctgatgatgtggggatctggccgctcgttgtgattcgtggagatgtacattatgtacagatcggagcacgcaccaatatccaggatggcagtatgttgcatgtcactcataaatccagctacaacccagatggcaacccattaaccattggcgaagatgtcactgttggtcacaaggtgatgctccacggctgcaccattggcaatcgagttttggttgggatgggcagtattttacttgatggcgcaatagtagaagatgatgtgatgattggtgcgggtagtctggtcccacaaaataaacggctggagagcggatatctgtatctcggtagccccgtcaaacagatccgcccgttaagtgatgaagagaaggctgggttacgctattccgcgaataattacgtgaaatggaaggacgaatatctggatcagggtaaccagacccagccttgatcatcttcactttgttcctgaattaagttttccgcttcttcttccaggtcccagcgatgctgacgaaaactcgctaaccactgttctggcgtatctccagtaaagcgatacgccagactctcgccagagatcgcgcatgtcagttgcataccattcacgagagcgggaaaacatacacattttttattctcgtcccactcttccctgtccggaaactggatggcctgattcacgcggacaattcctcctgcaattgctttataactggttctacgtcaggcagaacaccgtgccagagaagaaaggcatgagccgcctgtgccaccagcattcctaaaccatcagcattacgcttactgcctcgctgctcacaccatgccagaaaaggagtttttcctttctgatagaacatgtcatagcaataaatgcctggatgaatgaggctactcgggatcgccggaatatcaccactgatgccactggatgttgcattaataatgagatcaaactcatgaccttccagttcgtccatactcaacgcctgaatactgccagtgtgcgcaaacaatttagccaactcttccgcgcgggataccgtccgattagttattgtcaccgcacagtccagggaaaggagtggcagtagtacgccgcgagatgctccaccagcgccgataagcagaatacgtaaaccagggcggataaaagacagacgttccagatcgcttaacaagcctacaccatcggtattgtcacccagcaggcgtccatcttctaaccgcatgagggtattaacagcaccagccaacgctgcccgttcagtaagctcatccgctctggcaaaagcctcttctttaaaaggcaccgtcacattcgcacctttaccaccagcactaaagaaagcgttcagtgtgttgatgaaatcattgatgggtgccaacacgcgcccatagggatgttcaatattcagttgctgagcaaattgctgatgaatgaatgggcttttgctgtgggctatcggattaccaaaaacagcataggtttccattatgttacccctgtcgaaacagttcacccgtcagggcatcgcggatttcactaggatttaaacgcccccccgtttcaccaggcacaaccgggaacgccgcgccaaattgtgcgcgaacttcgtctactgttcgacaaggtggcaatccactcaagttggcactggtagaaaccagcggtttaccataagcctggcacaaagcaaccaccaacggatggtcggtgactcgtacagcaaggctatcaaagcggcccgtcaaccagcgcggtgttgtcgcaggcgcgggaaagacaaaggtgacaggacctggccagcgggaaaaaatggtttcacgctgcacgtcagtcaacatggtgtcatcaatatagggtttaagctgctcgtaatttgctgcgattaaaatcagccccttatcaaccggacgctgttttaactccaacagtcgcatcactgctgtttcgctatcaggatcgcacccaacaccgaaaacggcttccgttggataggcgatgacacgttcttcattgagaacatctatcgcagctgcgatagcgtctctttgcaggttattattcacgttattattccgcgctaaccggctttccacattgtttactggcacaaaagtgttttacaccctgcgcggttttcttttcgatgagtagcggataatgacactcagggcattctccagctatgggtttgaagttaatggcaaattgacactccgggtagcgatcacaagagtgaaatgttttgccataacgggagcggcgctggaccagatggcccgtccgacattgggggcatgtaattgctgtttcgtccggtttatcgataagttcggtatgttcgcattcagggtagttaatgcaaccaataaacataccaaagcgtccctggcgtaataccagatttgcgccacatgcagggcaaacctgcccctccagaactttgacgatatgtccatccgcactagatttcagaggacggacgtagtcacacgccggatactgactgcatccaagaaacggaccgtgtttcccggatcgaataaccagttcagccccgcactttgggcaggactcattattacgcaccgtgaacagtgcacttttcgccataacaacttatgctgaattaaagaaatgattaatgcagcataccttcattcacttcaaagagtaattcttccatttgctggtacgcattttcgcagcccggaatattgaacaacaccatcaggatcacccatttcagatcatccagttcgaactctgcgttatccagcgcgagcactcgctctatcaccatttcacgagtttcaaggttgagcacctgaatctgctcaaggaaaagcagaaacccacggcagctggcatccagtcgttcacactcttccggtgtataaatacgcatggagagaggatcgctggccagttgcatcggttctgccaacccttcctgataatcagcaagtttttccagccatagcagggcattgtagatatcttctcgctcaaaacctgcgtcggtaagatcctgttcaagtttgtcttgatccacacgcaactcagcttctgtgtgaatataggtttcaaacaaatacattagtacgtcgaacatggcatgccctcctcaatcggacatagccgccgggtacagctgcgatccatcctgctaactccagttcgagtagttgagtaactacctctggcacaggttggccggcacgttcagcgacgacgtcaacaggtgttacctcatctcctacgttagccaggagctcaggaaatggcaatgccacgtcttgctgatctggactataaaaactattttcaggggcgtctggcaaccagtgcaatccaaattgcaagttttccagaatttcttccggttccgtcacaagaatcgcaccttgttttattaaccagtgaggcccttcgcttcccggattccctattggacctggcaaggcaaaaacttctcgcccctgctcaagcgcacaacgtgctgtcaccaggctaccactacgcaaagccgcttccaccaccagtacacctttacttagaccactgataatgcgatttcttcgtgggaaattgtaagcaaggggtggaacatcgaggggaaattcgctgacgagagcgcccccctgttcaagcagactggcagccagtcgggcatgacggcggggatgaatggtattaagtccattccccaatacagcaatgctgacgccatttacctgtaaggctgctttatgcgctacaccatcgattccacgcgccagtccactcgtaattgtcactccacgcgtcgccagagtttcgcaaaataatcgtccccatcgctcgccataccaactatgcgcccgactccccactacggcaagctgaaaactatgcagcgcgtgcagttctccttcaacaaacagtgcgccggggtaatctgtcgtcgccagaagttgaggaggataaaattcgctgtccgcaggaattaaatgatggttgggttgctccaaccaacaaagactgctttcgatactctttcgtggaaaactaagaaagcgttgtgcctgccgcaatgtaagccctgtttgctgcaatacaaccgcatcaatatggctctgttttgccacccagtgagcgatacggaccatatcatcgccgtacaagctgctgatactcattaaacgcagccaaatttctgtatcgaccatccttatctccctgccataagcagccttagcaatctttgcgattggtcagtgatgctgtcaatcagagggggatttgtctagaatagaagaaataatctttctaactcctgaacacatctctggagatttatgagtgttttgcaagtgttacatattccggacgagcggcttcgcaaagttgctaaaccggtagaagaagtgaatgcagaaattcagcgtatcgtcgatgatatgttcgagacgatgtacgcagaagaaggtattggcctggcggcaacccaggttgatatccatcaacgtatcattgttattgatgttagcgaaaaccgtgacgaacggctagtgttaatcaatccagagcttttagaaaaaagcggcgaaacaggcattgaagaaggttgcctgagcatccctgaacaacgtgctttagtgccgcgcgcagagaaagttaaaattcgcgcccttgaccgcgacggtaaaccatttgaactggaagcagacggtctgttagccatctgtattcagcatgagatggatcacctggtcggcaaactgtttatggattatctgagtccgctgaaacaacaacgtattcgtcagaaagttgaaaaactggatcgtctgaaagcccgggcttaaggataagaactaacgtgagtgaaagtctacgtattatttttgcgggtacacctgactttgcagcgcgtcatctcgacgcgctgttgtcttctggtcataacgtcgttggcgtgttcacccagccagaccgaccggcaggacgcggtaaaaaactgatgcccagcccggttaaagttctggctgaggaaaaaggtctgcccgtttttcaacctgtttccctgcgtccacaagaaaaccagcaactggtcgccgaactgcaggctgatgttatggtcgtcgtcgcctatggtttaattctgccgaaagcagtgctggagatgccgcgtcttggctgtatcaacgttcatggtagtctgctgccacgctggcgcggtgctgcaccaatccaacgcagtctatgggcgggtgatgcagaaactggtgtgaccattatgcaaatggatgtcggtttagacaccggtgatatgctctataagctctcctgcccgattactgcagaagataccagtggtacgctgtacgacaagctggcagagcttggcccacaagggcttatcaccacgttgaaacaactggcagacggcacggcgaaaccagaagttcaggacgaaactcttgtcacttacgccgagaagttgagtaaagaagaagcgcgtattgactggagtcttagcgcagcacagcttgaacgctgcattcgcgctttcaatccatggccaatgagctggctggaaattgaaggacagccggttaaagtctggaaagcaagcgtcattgatacggcaaccaacgctgcaccaggaacgatccttgaagccaacaaacaaggcattcaggttgcgactggtgatggcatcctgaacctgctcagcttacaacctgcgggtaagaaagcgatgagcgcgcaagacctcctgaactctcgtcgggaatggtttgttccgggcaaccgtctggtctgatagtccactcttctaagcccggtcttgccgggcgtttttatacttatgaaaaaacaacgtaatttacgtagcatggcggcccaggccgttgaacaagtcgtcgagcaagggcaaagtttaagcaacattctgccaccgctccagcaaaaagtttccgataaagacaaagcacttcttcaagagttgtgctttggcgtactgcgtacgcttagccagttagactggctgattaataagttaatggcccgtccgatgaccggcaaacagcggaccgtgcattacctgattatggttggtttgtatcaactgctttatacccgcattccacctcatgctgcgctggctgaaacggttgaaggcgctatcgcaattaagcgtccgcaacttaaagggttgataaacggtgtattacgccagttccagcgtcagcaagaagagttattagccgagtttaatgccagtgatgcacgttatctgcatccttcctggttgctgaagcgtctgcaaaaagcgtatccagagcagtggcaatccatcgtcgaagccaataaccagcgtccgccaatgtggctgcgtattaatcgtacgcatcattcccgcgacagctggcttgcattgctggatgaagcaggaatgaaaggtttcccgcatgcggattaccctgatgctgtacgtctggaaacacctgcacctgttcatgcgctacctggttttgaagacggatgggttaccgttcaggatgcaagtgcacaaggttgcatgacctggcttgcgccacaaaacggtgaacacattttggatctttgtgccgcccccggcggtaaaacaacgcatatccttgaggtggcaccagaagcgcaggttgttgcggttgatatcgacgaacagcgcctctctcgggtttacgacaatttaaaacgccttggtatgaaggcgaccgtgaaacaaggtgatggccgttacccttctcaatggtgtggcgagcaacagtttgatcgcattttattagatgcgccttgtagtgcaaccggtgtgattcgtcgccatccagatattaaatggttacgtcgcgatcgcgatatcccggaactcgcgcaattgcagtctgaaattctcgacgccatttggccgcatttaaaaaccggtggaactctggtctatgccacctgtagcgtgttaccggaagagaatagcctgcagattaaagcctttttgcaacgtaccgctgatgccgaactttgcgaaacaggaacaccagagcaaccgggtaaacaaaatctacctggtgccgaagagggcgacggcttcttttacgctaagctaatcaaaaagtgatgagataacgggtcgcgactgatgaaaattatcattctgggtgccggccaggttggcggcacactggcggaaaacctggttggcgagaacaacgatattactgttgtcgataccaacggtgagcgtctgcggaccttacaggataaatttgacctgcgggtcgtgcaggggcatggctctcatccacgcgtattgcgggaggcaggtgccgacgacgccgatatgctggttgctgtaaccagtagtgatgaaaccaatatggttgcctgccaggtagcctacagtcttttcaacacccctaatcgcatcgctcgtatccgcagtccagactacgtgcgcgatgccgataagctatttcatagtgatgctgtgccgattgatcatctgatcgcaccagagcagttggttatcgataatatttaccgactgattgagtatcccggcgcattgcaggtggtgaacttcgctgagggtaaagtcagcctggctgtggttaaagcctattatggcggcccgctgattggtaatgcacttagcaccatgcgcgaacatatgccacatatcgatactcgtgtggcagcaattttccgccacgatcgccccattcgtccgcaaggtagcaccattgttgaagctggtgatgaagtgttctttattgccgctagtcagcatatccgcgcggtgatgagtgaattacagcgactggaaaaaccgtataagcggatcatgctggttggtggcggtaatatcggtgcagggctggcgcgtcgtctggaaaaagattacagcgttaaactcatcgaacgtaatcagcagcgcgctgccgaactggcggaaaagttacagaatacgatcgtcttttttggtgatgcgagcgatcaagaactactggccgaagaacatatcgatcaagttgatctgtttattgccgtcaccaacgatgacgaggccaatatcatgtccgccatgcttgccaaacgtatgggtgcgaaaaaggtgatggtattgatccagcgtcgcgcttatgtggatctggttcaggggagcgttatcgatattgcgattagtccacaacaagcaactatttctgcgttgcttagccatgtgcgaaaagcagatattgttggtgtttccagtttgcgccgcggcgtagcagaagctattgaagccgttgctcacggtgatgaaagcaccagtcgcgttgtcggcagagtcattgacgaaatcaagctaccgccaggaacgattattggagcggtggtacgtggaaacgacgtgatgattgccaatgacaatctgcgcattgagcaaggcgatcacgtaattatgttcctcacagataaaaagtttattaccgacgtcgaaagactcttccagccaagccctttcttcttgtaattaataaggcgtctaatgacgccttattatttccctttgattatcaaggattaattaaattcattcctggcaggaaaatggcttaacatttgttagacttatggttgtcggcttcatagggagaataacatgagcattattaaagaatttcgcgaatttgcgatgcgcgggaacgtggtggatttggcggtgggtgtcattatcggtgcggcattcgggaagattgtctctagtctggttgccgatatcatcatgcctcctctgggcttattaattggcgggatcgattttaaacagtttgctgtcacgctacgcgatgcgcagggggatatccctgctgttgtgatgcattacggtgtcttcattcaaaacgtctttgattttctgattgtggcctttgccatctttatggcgattaagctaatcaacaaactgaatcggaaaaaagaagaaccagcagccgcacctgcaccaactaaagaagaagtattactgacagaaattcgtgatttgctgaaagagcagaataaccgctcttaacaagcgccactaagcagaagaccagtggtaaaaaagtgatttactttcttgccactggcctcccagttcccccgattgccatgttttccttttcgcatgtaactgcctttccccttcttatttttctctacgcgctgtcggaataagggatcatgtagtaatgcttctatcgcattatcctttatctgccctttagtatgctgatatcgactcataaaaactccagttggttatttaacggcgcgagtgtaatcctgccagtgcaaaaaatcaacaaccactcttaacgccactcgccccttgttcaagagcttcaagaatgctacaataaacactgctatgagcagtcccacaacaggcatcgttaaggcgttgcaaggaacgctgcatactctgcaactcggctatccgtgcttcgacttcctgcaatctttcctgcacaatgcctttactctcctgacaggtatggtgttcaggatcgatgcggatgctcagcaactcgcggatgctctccagactgaaacctagttgtctggcatggcggataaatttcaatcgctggagatcgctttcggtatataggcgaaacccaccttcagtacgcacttcatgctccatcatctgctgtttttcgtaataacgaatcgtgtcgggtgttacttccgccatttttgccagctcaccaatgcgatacatacatactccattagttatcgttgattttgtccaacaacttgtcagcataatcgccgcgtaaaaaatcggtactcaatccagcttgtcgcagcttcaattccagtaaactcaatcgacggctaacctcttgatattgcggatcatcgtgacggatacctttgagaatatccagaagctgaattgcttctctccgttgctcaagttctggcggtaagcaaccggcattcttcagcaagcgataccccgcacgtaattccggtggcacgtgagaatcatcatccagtatcaatggttcgccgctacctgccaggttatcaaactcacctttcgcttgcgcttctgctatatggcgctctgcccactggtcaagtaaccacataaatactccaggggatgaacaaaaagagtacagctattgtagataagtggggatactacgggtataaaaaaacccgccggggcgggtttttttacgttgcttcagattactctgcagcagcttctgctttctcactacgatcaaccagctcgatgtaagccatcggcgcgttgtcgcctgcacggaagccacacttcagaatacgagtgtaaccaccggcacggctcgcgaaacgcgggcccagttcgttaaacagttttgccacgatctcgttatcacgagtacgggcgaatgccagacgacgattagcaacgctatcagtcttggcaagagtaatcagcggctcaactacgcggcgcagctctttcgctttaggcagagtcgtcttgatgatttcatgacgaaccagactacctgccatattgcggaacatagcctggcgatggctgctgttgcggttcagttgacgaccactcttacgatggcgcatgaccttatccttctcagtaaaaccttaacctgtgatccggttactcgtcagcgatgcttgccggtggccagttttccaggcgcatgcccagagacagtccacgggaagccagcacgtctttaatctcagtaagagattttttaccaaggttaggcgttttaaggagctcaacctcggtacgctgtaccagatcaccgatatagtggatagcttctgctttaaggcagttagcagagcggacagtcaattccagatcgtcaacagggcgcagcaggatcggatcgaactctggtttctcttctttcacttcaggctgacgtacatcacgtaagtcaacgaaagcttccagttgttcagccagaatggttgccgcacgacgaatcgcctcttcaggatcgattgtgccgttggtttccatttcgatgaccagcttgtccaggtcggtacgctgttctacacgcgctgcttcaacattgtaggcaatacgctccacagggctgtagcatgcgtcgaccagcagacggccgattgggcgctcatcttcttcgctatgaattcgggtagaagccggcacataaccacgaccgcgctgaactttgatacgcatgctaatagacgcgttctcatcggtcaggtggcagatcacgtgctgcggcttgacgatttcgacatcaccgtcgtgggtgatatcggctgcagtcacagggccaatgccagatttattcaaggtaagaataacttcatctttgccctgaactctcaccgccagccctttcaggttgagcaggatttccaggatatcttcctgaacgccttctttggtgctgtactcatgtagtacaccatcaatctcaacctcggtcaccgcgcaacccggcatgctactgagcagaatacggcgcagtgcgttacccagagtatggccaaagccacgctctaaaggctcaagggtcaccttggcgtgcgtgctactcacttgctcgatatcaaccaggcgcggttttagaaactctgtcacagaaccctgcattgtgtcctctctttggtactaagctttacttggagtaaagctcgacgatcaggtgttcgttaatgtccgcagacagatcagaacgctccggcttacgcttaaacgtaccttccatcttgccagcatcaacttccagccaggttggcttttcacgctgctcagccagctccagagcggctttcacgcgagactgcttcttcgctttctcacgaatgcttacaacgtcattcggactaacctgataagaagcgatgttaacaacacgaccgtttaccataattgctttatggctaaccagctgacgtgcttctgcacgagtggcaccgaagcccatacggtatacaacgttgtccagacgaccttccagcagagccaacaggttttcaccggtgttgcctttcagacgtgctgcttctttgtagtagttacggaactgacgctccagcacaccatagatacggcgaactttttgcttttcacgcaactgcacaccatagtcagacagacgcggtttacgcgcaccgtgctggccaggagcttgttcaattttacacttggtatcgatcgcgcgaacgccagacttaaggaataagtcggtgccctcacgacggctcagcttgagcttaggacccaaatatcttgccattttctttctccaacaaacctggaaaacgaggcgttatacgcgacgttttttcggcggacgacaaccgttatgagggatcggagtcacatcagtaatgttagtgatgcggaaacctgcggcgttcagagcacgaatagtagattcgcggcctggacccggacctttaaccataacttccagattcttgatgccgtattctttcacggcgtcagcgcaacgctctgctgcaacctgagctgcaaacggagtggatttgcgagaaccacggaaaccggaaccaccggctgttgcccaacccaacgcgttaccctgacgatcagtgatagtcacgatggtgttgttgaaagaagcatggatatgagccacgccgtcagagacttgttttcttacacgtttacgtgcacgaattggtgcctttgccattattcaatcaccccgattatttcttgatcggtttgcgcggacccttacgggtacgtgcgttggtcttggtacgctgaccgcgaaccgggagaccacgacgatgacgcaaaccgcgatagcaaccaagatccatcaggcgcttgatgctcatgctgatttcacggcgcagatcaccttcaacgacaaatttggcaacttcgtcacgcagcgtgtcgatttgtccttcagacagctcactgatcttaacatcttcagcgatacccgctgcagccaggatggctttagaacgggtcttgccgacgccataaatgctagttaatgcgattacggcatgcttatgatcaggaatgttaatgcctgctatacgggccactatgcactcctactatttaatatgtacgttccatgctgaaaagcccgttttcaggatactcaaatggaaacgcacagacatacaaaagattggctggctaatctagccagctcaacccaactttgcaagaaaaatatgcgaaaaaatcagccttggcgctgtttatgcttcggctcggcactgcaaatcacacggatgacaccatcacgcttaacgattttgcagttacggcataatttcttgacggaagcacgaactttcatttttactctccgtaacttctcgggcgaccaattatcggccgtagcctttcaggttcgccttcttcaatgcagactcatactgactggacatcatcagagtttgcacttgagccataaagtccataatcacgacaacaacgataagcagactggtcccaccgaagtagaacggtactttcattgcatcacgcatgaactccgggatcaggcagataaaggtaatatacagcgcaccaaccagggtcaggcgggtcattactttatcgatatacttcgccgtttgctctcccggacgaattcctggtacaaatgcaccggacttcttcaggttatctgctgtttcacgcgggttgaaaaccaacgccgtgtagaagaaacagaagaagatgattgcagacgcatagagtaacacataaagcggttgcccaggctgcaaatacaggctaattgttgtcagccagttccaaccagtaccgcccccgaaccaactcgcgatggtcgccgggaacagaataatactggaagcgaagattgccgggattacccccgccatattcactttcagcggtaaatgtgtgctctgtgcagcatagacacgacgaccttgctgacgtttcgcgtagtttaccacaatgcggcgttgaccacgctcaacaaatacaacaaagaacgtcactgcaaatactaatactgcaaccaacagcaacacgaggaagtgcaggtcgccttgacgcgcttgctcgatagtatgggcaatggctggcgggagtcccgcgacaataccggcgaagataatgatactaataccgttgccgatacctcgttcagtaatctgttcgcccaaccacatcaggaacatggttcctgtgaccagacttacaacagcggtgaagtagaatgcaaagcccgggttaatcaccaggccttgcataccaggcatattcggcagaccggtagcaataccgatgctctggaatattgccagcaccagagtaccgtagcgggtgtactggctgatcttacgacgaccagactccccttctttcttaatttctgccaacgttgggtgaaccaccgtcagcagctggataatgatgctcgcgctaatatacggcatgatccccagagcaaagatagaagcacggctgagagcaccaccagagaacatgttaaacatctcaatgatggtgcctcgctgttgctcaagcagtttggcaagtacagcggcatcaataccagggatcggaataaaagagccaatacggaacacaatcagcgcaccgataacaaacagcagtctgcgtttcagctcgcctaagccacctttggcactttgaaaatctaatcccggttgtttagccatctgctacttattcctcgattttaccgccagcagcttcgatagcagcacgagcgcctttagtaacacgcaggccacgaacagttaccggagtcgttacttcgccagccaggatcactttcgcgaactcgatctggataccgataatgttagccgctttcagcgtgttcaggtctactacaccgccttctactttagccaggtcagacagacgaatttcggctgtaatcgctgctttacgagaagtgaagccgaatttcggcagacgacggtacagaggcatctgaccaccctcgaaaccgcgacgtacgccaccgccagaacgagacttctgacctttgtgaccacgaccaccggttttaccgaggccagaaccgataccacgacccaggcgtttacccgcctttttggagccttcggccggagacagagtatttaaacgcatctcttactcctcaactttaaccatgaaggaaaccgcgttgatcataccgcgaatagcaggagtatcctcgcgctctacggtgtgaccaatacgacgcagacccaggccaagcagcgttgccttgtgtttcggcagacgaccgattgcactgcgggtttgagtaattttaatagtctttgccatggtttatttccccagaatttcttcaacggatttaccacgcttggcagcgaccatttctggagaattcatattttccaggccatcaatagttgcacgaaccacgttgatcgggttggtggaaccataggctttagccagaacgttatgaaccccagcgacttccagaacggcgcgcattgcaccaccggcgatgataccggtaccttcggaagccggctgcatgaatacgcgagaacccgtgtgaacacctttaacagggtgttgcagagtgccgttattcagcgcgacgttaatcatattgcgacgggctttttccatcgctttctggatcgctgctggaacttcacgcgctttaccgtaaccaaaaccaacgcgaccgttaccatcgccaactacagtcagagctgtgaaggagaaaatacgaccacctttaacggttttagatacgcggtttaccgcgatcagcttttcctgcagttcgccagcttgtttttcgatgtgagccatcttacacctctaccttagaactgaaggccagcttcacgggcagcatctgccagtgcctggacacgaccatgatattggaacccggaacggtcaaaggatacatctttgatgcctttttccagagcgcgttcagcgacagctttacccacagctgcagccgcgtctttgttaccggtgtacttcagttgttcagcgatagctttttctacagtagaagcagctaccagaacttcagaaccgttcggtgcaattacctgtgcgtaaatgtgacgcggggtacgatgtaccaccaggcgagttgcgcccagctcctggagcttgcggcgtgcgcgggtcgcacgacggatacgagcagatttcttatccatagtgttaccttacttcttcttagcctctttggtacgcacgacttcgtcggcgtaacgaacacccttgcctttataaggctcaggacgacggtaggcgcgcagatccgctgcaacctggccgatcacctgcttatcagcgcctttcagcacgatttcagtctgagtcggacattcagcagtgatacccgcaggcagctgatggtcaacaggatgagagaaacccagagacaggttaatcacattgcctttaaccgctgcacggtaacctacaccaaccagctgcagcttcttagtgaagccttcggtaacaccgataaccatactgttcagcagggcacgcgcggtaccagcctgtgcccaaccgtctgcgtaaccatcacgcggaccgaaggtcagggtattatctgcatgtttaacttcaacagcatcgttgagagtacgagtcagctcgccgtttttacctttgatcgtaataacctgaccgttgatttttacgtcaacgccggcaggaacaacgaccggtgctttagcaacacgagacattttttcctccgattaggctacgtagcagataatttcgccaccaagaccagcctggcgcgctgcacgatcagtcataacacctttagaggtagaaacaactgcgatacccagacccgccataactttcggcagctcatctttacgtttatagatgcgcagacctgggcggctgacacgctgaatgctttctacaacagctttgccctggaaatacttcagagtaagttccagttcaggcttggtgtcgccttcaactttaaaatcttcaataaaaccttcttccttcagcacgttggcgattgccactttcagcttggaggaaggcatggtgaccgcagctttgttcgcggcctgaccgttacggatacgggtcagcatatccgcgatcggatcttgcatgctcatctgtctttactcccgtgattcaattggtgacaattaccagctagcctttttcagacccgggatttcaccgcgcatagcggcttcacggaccttaatacggctcaacccgaacttccgcaggaaaccatgcggacgacctgtttgacggcagcggttacgctgacgagacgggctggaatcacgcggcagagtctgcagcttgagaacagcgttccaacgatcttcgtcggaagcgttcacatcagagatgatcgctttcagttcagcgcgtttcgcgaagtatttatcagctaaagctacgcgttttacttcgcgtgctttcatactttgcttagccatttagtaaccctaccttacttgcggaacgggaagtcaaaggcagccagcagagcgcggccttcttcgtcagatttcgcagtagtggtaatggtaatatccaaaccacgaacgcggtcgactttatcgtagtcgatttctgggaagatgatctgctcacggacacccatgctgtagttaccacgaccgtcgaaagacttagcggacaggccacggaagtcacggatacgaggtacagcaatagtgatcaggcgctcaaagaactcccacatgcgttcgccacgcagagttactttacagccgatcggatagccctgacggattttgaagcctgcaacagatttgcgtgctttggtgatcagcggtttttgaccggagattgctgccaggtctgctgctgcgttatccagcagttttttgtcagcgatcgcttcaccaacacccatgttcagggtgatcttctcgacccgagggacttgcatgacagaattgtagttaaactcagtcatgagttttttaactacttcgtctttgtagtaatcatgcagtttcgccatcgtactactccaaattacttgatagtttcgctgttagacttgaagaaacggacttttttaccgtcttcgaatctaaagcctacacggtcagccttgccggttgccgcattgaagattgctacgttggaaacctgaatagcggcttctttttcaacgatgccacccggttggttcagggccggaaccggcttctgatgtttcttaaccaggttgataccttcaacaatgaccttgccggaagacaggacattcttaactttaccgcgtttacctttatctttaccggttaacacgataacttcgtcatcacgacggattttcgctgccatgattcgctccttagagtacttctggtgccagagagataattttcatgaacttctcactacgaagctcacgagttaccggcccaaaaatacgcgtaccgataggctgctcgctgttgttgttcagaagaacacaagcattaccatcgaagcgaatgacagaaccgtccgggcgacgaacacccttcttggtgcgcaccactaccgccttcagcacatcaccttttttgaccttaccacgcggaattgcttctttgatggtgatcttgatgatgtcgcctacgcctgcgtagcgacggtggctgccacccagaaccttgatacacattacgcgacgtgcaccggagttgtcggcgacgttcagcatagtctgttcttggatcattttagtgctccgctaatgtcaactactactgagacccgaaaatcaggtcgttaaaaatccccatatcgagggcgcggcattataacaccgcttcaaggatatgggtagaaaaaataaacggctcatttctgagccgtttattcgtattgagagagtgtactgtattacagaaccgctttctctacaacgcgaaccagcgtccaggatttagtcttggacagcggacggcattcgcggatttcaaccacgtcaccgataccgcattcgttgttctcgtcatgtacgtgcagtttggtcgtacgcttgatgaatttaccgtagatcgggtgtttcacaaaacgttcgatagcaacaacaatggatttctccattttgtcgctaacaacgcgaccttgcagagtacggattttatcggtcattacgcacccgccttctcgttcagtaaagtcttaacgcgtgcgacatcgcgacgcacttgcttcaacaggtgagactgttgcagctggccacttgcagcctgcatacgcaggttgaactgctcacgcagcaggttcagcagctcggtgttcagctcttcaacgctcttctcacgcagctcttttgctttcattacatcaccgtcttagttacaaaggtggttttaatcggcagtttcgctgctgccagcttgaatgcttcacgggccagctcttccggaacaccgtccatttcatacaggactttacccggctgaatcaaggcaacccaatactccacgttacctttacctttacccatacgcactgccagcggcttttcagtgatcggtttgtccgggaacacacggatccagatcttaccttgacgcttaactgcacgggtcatagcacgacgtgctgcttcgatctgacgggcagtcagacgaccacggccaacagctttcagaccgaagctgccgaagctaacatccgtaccctgcgccagaccgcggttacggcctttgtgcattttacggaattttgtacgctttggttgtaacatcagcgacgctccttatttacggcctttacgctgctgctttttaggctgagcagccggtttttccggttgttcaacagcagccataccacccaggatctcgcctttgaagatccacactttaacgccgattacaccgtaagtggtgtgcgcttcagaggtgttgtagtcgatgtcagcacgcagagtgtgcagcggtacgcgaccttcgcggtaccattcggtacgtgcgatttccgcgccgcccagacggccgctaacttcaactttaatacctttagcgcccagacgcattgcgttctgtacagcacgcttcatagcacgacggaacataacgcgacgttccagctgagaagtgatgctgtcagcaaccagttttgcgtccagttcaggcttacgaacttcggcgatgttgatctgtgcaggaacgccagcgatgtccgctacgaccttacgcagtttttctacgtcttcaccttttttaccgataacgatacccgggcgagcagtgtgaatggttacacggatgctcttagccggacgctcgataacgatacgagatacggacgctttagccagttccttagtcaggtactgacgtactttaaaatcgctgtccaggttgtcagcgaattctttggtgttcgcaaaccaggtagagttccatggttttacaatacccaggcgaataccattaggatgtactttctgacccattgctagtctccagagtctcagcgatcggacacaaccacagtgatgtggctggtgcgcttcaggatgcgatctgcacgaccttttgcacgcggcataatgcgcttcatgctcgggccttcgtctacgaaaattttcgtaactttcagatcgtcaatgtcagcgccatcgttgtgttcagcgttagcaatggcagattccagaactttcttgaccagtacagccgctttcttgttggtgtaggtcaaaatatccagagcctggctcactttcttaccgcgaatcaggtcagcaacaaggcgaaccttctgagcagaagaacgagcatggcgatgtttagcgatagtttccatctcttcctcctaccttatttcttcttcgcttttttatcagcagcgtggccgcgataagtacgagtcggtgcgaattcacccagtttgtgaccaaccatttcgtcggttacaaataccggaacgtgctgacgaccattatggacagcgatggtcaaaccgatcatgttaggaaagatcgtactacgacgggaccaagtgcgcaggggcttcttgtctccgctttccaccgctttctctaccttcttcagcaagtgcaggtcaataaaaggacctttcttgagagaacgtggcatggcttatcctctaaaattatttgctacggcgacgtacgatgaatttatcagtacgcttgttgctgcgggtcttcttacctttggtctgaacgccccacggagttaccgggtgcttaccaaagttacgaccttcaccaccaccatgtgggtggtctaccgggttcatcgcggtaccgcgaacggtcggacgaacaccacgccagcgtgcagcacctgctttacccagaacgcgcagcatatgctcagcattgccaacttcgcccagagttgcacggcagtctgcttctactttacgcatttcaccagaacgcagacgcagggtgacataagcaccatcacgagcaacgatctgaacgtaagtaccagcggaacgtgccagctgaccgcctttacctggtttcatttctacgttatgaacagtagaaccaaccgggatgttgcgcatcggcagggtgttacctggtttgattgcagcatcaacgccagactgaatctggtcgccagctttcaggcctttaggggccaggatgtaacggcgttcaccgtctttgtacagaaccagcgcgatgttcgcggaacggttcggatcgtactcaagacgttcaacaactgccgggataccgtctttgttgcgtttgaagtcaacaatacggtaagcctgcttgtggccaccaccgatatgacgagtggtgatacggccattgttgttacgaccaccggatttgctgtttttttccagcaacggagcaaaaggtttgcccttgtgcagctcagggttaaccactttaactacgtggcgacgacccggagatgtcggtttacatttaacaactgccattgtattactcctccgacttactcagcgccgccaacgaagtccagattctggccttctttcagggtgacgtaagcttttttccagtcgctacgacgaccgatacgctgtccgtgacgtttaactttccctttaactaccagggtgttaacgacttcgacttcgacttcaaacagtttctgcacagcagctttgatttctgctttggtcgcgtctttagcaactttgagtacgatggtgttggatttttccatcgcagtagacgctttttcagaaacgtgcggtgcacgcagcaccttcagcagacgttcttcacgaatcatgccagcatctcctcaacttgcttaacagcatcagcagtcattacgactttgtcgaaggcgatcaggctaaccgggtcgataccagttgcatcgcgtacgtcaaccttgtgcaggttgcgcgcagccaggaacaggttttcgtccagctcaccggtgatgatcagcacatcttccagagccatgtctttcagtttctgtgccagcagcttagttttcggcgcttctacagagaacttctcgacaacgatcagacgatcctgacgtaccagttcggacaggatgcttttcagcgcgccgcggtacatcttcttgttaactttttgactgtggtcctgcggacgagcagcaaaggtcacgccaccagaacgccagatcgggctcttgatagaaccagaacgcgcacggccggtgcctttctggcgccacggttttttaccggaaccagttacttcagcacgagtcttctgagcacgagtaccctgacgagcaccagctgcataagcaacaacaacctggtgaaccagcgcttcgttgaaatcacgaccgaaggtagtttcggaaacagtcagcgcgctctgcgcgtctttcaatactaattccattgctatctccttacgccttcacagctggtttaacgatcaggtcgctaccggttgcacccgggacagcacctttaaccagcagcaggttgcgctcagcgtcaacgcgtactacgtcaaggctctgaacggttacacgttcgttacccatctgacctgccattttcttgcctttgaacactttgcccggagtctggttctgaccgatagaacccggaacgcggtgagacaaggagttaccgtgagtagcgtcctgggtacggaagttccagcgcttaacggtacctgcgaaacctttacctttagaggtgccagttacgtcaacttttttaacgtcagcaaacagttcaacgctaatgctctgacctacagtgaactcttcgccttcagccaggcggaattcccacagaccacggccagcttctacgccagctttagcgaagtggccagcttcaggcttggtcacacggttagcttttttagcaccggtggtcacctgaatagcacggtagccatcgttagccaggtctttaacctgagtaacgcggtttgcttcaacttcgattacggttactgggatagaaacgccgtcttctgtgaagatacgggtcatacccacttttttaccgactaaaccaatcattgtttcaacctctcaatcgctcaatgacctgattaacccaggctgatctgcacgtctacaccggcagccagatccagacgcatcagagcatcaacggttttctcggttggctcaacgatgtcaaccagacgcaagtgagtacggatttcgtactgatcgcgcgcgtctttgttgacgtgcggggagatcagaacagtgaagcgctctttgcgtgtcggcagcgggatcggaccacggacctgcgcaccagtgcgcttggcagtctcgacgatttccgcggttgcttgatcgatcagacgatgatcaaacgctttcaggcggatacggattctttggttctgcatgagaccagagctccaattattttataaacgaaaatgattactcctcagacccattacgattgatgggagagtgtaaccgttcttacgtagctccccgattgggagcattgttaggtagccaaattcggctaactgaggttcagattgaacctgctgtcaactacgacaagcccgcgcattatacatacttaaccaccgaacgcaagcgtattgctagtaaagtaaacagccttcgggttatctctcaagttcgttcagtgcatttttgacacgctctcttaaaccggctttctcttcgctttcttccacagtattttcttcgtcttcagaagaagagggggcattctcaaccgcgacgcctgggtcatcttcctcctcgacggattcgacgacggggagtggctgttttttgaagaaatagtgttgtgtactttgtttaaaagcgggcgtttcagcctctacagtgacttcggcttttactatccaaagcacccatagctgcctggcatacccaccaaccagcaccattcctgcaaaccacaggcaaatcagtaataaacaaattacatatattatggtgctgtgtttttgtcgggagaagataccagggtgacctgtttctttctgctcacgcgcggcgatatagaattcaaacattataatcccttgtgacgtaaaaactgcaaaacaaaagtcctacgcaggaattatttacgttttacgagaacccttcaatatgaattaaattacggcattaaaaataagaaaaaagcctgacaaatgaagcattttaaaaacagaaacattcatatttaaaatgttaaattgaattgatattttaaatatgaataatttattcgttctgacagtacgaataagatatgccgtcaacaaatgcaaaaagggcgccgaagcgcccttttcaattcaaaactaattaacgtgtaattagcccagaactttagcaacaacgcccgcgccaacggtacggccgccttcacggattgcgaaacgcagaccgtcgtccatcgcgatcgggtggatcagggtaacaaccattttgatgttgtcgcccggcattaccatctctacgccttccggcagttcgatggtaccagtcacgtcagtagtacggaagtagaactgcggacggtagcctttgaagaacggagtatgacggccgccttcatctttggacagaatgtacacttcagattcgaacttggtgtgcggcttgatggtgcccggcttagccagtacctgaccacgttcgatttcttcacgtttgataccacgcagcagaacacctacgttctcaccagcacggccttcgtccagcagtttgcggaacatttcaacgccagtacaggtagacttctgagtctctttgataccaacgatttcaacttcttcaccaactttgatgataccgcgttctacacgaccggtaacaacggtaccacgaccggagatggagaatacgtcttcgatcggcagcaggaacggcttgtcaatcgcacgctctggttccggaatataagaatccaggaagccagccagttccaggattttcgcttcccactctgcgtcgccttccagcgctttcagagcagaaccacgaacgatcggagtgtcgtcgcccgggaagtcgtactgagacagaagttcacgaacttccatttcaaccagttccagcagctcttcgtcatcaaccatgtcgcatttgttcaggaacacgatgatgtacggaacgcctacctgacgacccagcaggatgtgctcacgagtctgcggcatcgggccgtcagtcgcagcaactaccaggatcgcgccgtccatctgagcagcaccggtgatcatgtttttaacatagtcggcgtgccccgggcagtctacgtgtgcgtagtgacgggtcggggtgtcgtattcaacgtgagaagtgttgatggtgataccacgagctttttcttccggcgcgttatcgatctggtcgaatgcacgagcagcaccgccgtaggttttagccagtacggtggtgattgcagcggtcagagtagttttaccgtggtcaacgtggccgatagtaccaacgttaacgtgcggttttgtacgttcaaatttttctttagacacggctatattccttactatagtgctctccccttcaggagagagcacgggactttggtattaacccttaggcttatttaccacgggcttcaattacggcctgagcaacgttactcggcgcttcatcatacttcaggaattccatagtgtaacttgcacgacctttggtcagagaacgcagctgagttgcgtatccgaacatttcagacagcggtacttcagcgtggatcttaacgccagtaacttcagattcctgacctttgagcataccacgacgacggctcaagtcaccgataacgtcaccggtgttctcttccggagtttctacttcaaccttcatgatcggctcaagcagaactggtttcgctttcttaaagccttctttaaaggcgatagaagcagccagtttaaacgccagttcagaggagtcaacgtcatggtaagaaccgaagtgcagacgaatacccatgtctactaccgggtagcctgccagcggacctgctttcagctgttcctggatacctttatcaacggccgggatgtattcgccagggattacaccacctttaatgtcgttgatgaactcgtagcctttcgggttactacccggctccagcgggtacatgtcgataacaacatgaccatactgaccacgaccaccagactgtttcgcgtgtttaccttcaacatcggtaactttctggcggatagtttcacggtaagcaacctgcggtttacctacgttcgcttcaacgttgaattcacgcttcatacggtcaacgatgatgtcgaggtgcagttcgcccatacccgcgatgatggtctggttagattcttcgtcagtccatacacggaaagacgggtcttctttagccagacggcccagagccagacccattttttcctggtcagctttggttttcggttcaactgcgatggagattaccggctcagggaattccatacgttccagaatgatcggcgcatccgggtcacacagggtgtcaccagtggttacgtctttcagaccgatagcagcagcgatgtcgcccgcgcgaacttctttgatctcttcacgtttgttagcgtgcatctgaacgatacgaccgaaacgctcacgtgcagctttcacggagttcagtacggtatcaccagagttaaccacaccggagtaaacacggaagaaggtcaggttaccaacaaacgggtcggtagcgattttgaacgccagtgcagagaacggctcgtcatcacttgcgtgacgttcagccggagtgtctttaccgtcgtccaggataccgttgatcgcaggtacgtcaaccggggatggcaggtaatcaattaccgcatccagcatcgcctgaacacctttgttcttgaacgcagaaccacaggttaccaggatgatttcgttgttcagaacgcgctgacgcagagcacctttgatttctgcttcagtcagttcttcaccacccaggtatttttccatcagctcttcagaagcttcagctgcggattcgatcaggttctggtgccattcgttagccagttcaaccatgtctgccgggatatcttcgtattcgaaggttacgccctggtcagcgtcgttccagttgatagctttcattttcaccaggtcaacaacaccggtgaaatgttcttcagcaccaatcgccagctgcagcggaaccgggttcgcgcccagacgggttttgatctggttaacaactttcaggaagttcgcacccatgcggtccattttgttaacgaacgcaatgcgcggaactttatatttgtttgcctgacgccatacggtttcagactgcggctgaacaccaccaactgcgcagtaaaccattaccgcaccatcgagaacacgcatggaacgttctacttcgattgtgaagtcaacgtgccccggggtgtcgatgatgttgatgcgatgcggctcatactgcttagccataccagaccagaatgcagtagtcgcagcggaagtgatggtaataccacgttcctgctcctgctccatccagtccatggttgcagcgccgtcatgaacttcaccgattttatggtttacaccggtgtagaacagaatacgttcggtagtagtggttttaccggcgtcgatgtgcgcactgataccgatgttacggtagcgtgcgatgggtgttgtacgagccatttgtttcctcgtttatcttttaggcgttcaatttaagtagcccaaagcgggctgcttactggaagcgcccgcctggtgactaaaactccgaagggataaccaacggtagtgtgcgaacgccttgttggcttcggccatacggtgaacgtcttcacgtttcttaactgcagtacctttgttttctgcagcatcagaaagttcgttcgccaggcgcagagccatggatttatcaccgcgtttacgagcagcttcaacgatccaacgcattgccagagcattacgacgaaccggacggacttcaactggtacctgataagtagaaccaccaacgcggcgagacttaacttctacagtcgggcgcacgttttcgagagctacttcgaatgcttccagttcagatttaccagagcgctgagccagggtctccagcgcgctgtatacgatagattcagcagtagattttttaccatctaccatcaggatatttacaaatttagccagcagttcacttccgaacttcggatccggcagaattttacgctgaccaatgacgcgacgacgtggcatggaaatactccgttgttaattcaggattgtccaaaactctacgagtttagtttgacatttaagttaaaacgtttggccttacttaacggagaaccattaagccttaggacgcttcacgccatacttggaacgagcctgcttacggtctttaacgccggagcagtcaagcgcaccacgtacggtgtggtaacgaacacccgggaggtctttaacacgaccgccacggatcaggatcacggagtgctcctgcaggttgtgaccttcaccaccgatgtaggaagtcacttcgaaaccgttagtcagacgaacacggcatactttacgcagcgcggagttcggtttacgaggagtggtagtatatacacgagtacatacgccacgtttttgcgggcatgcttccagcgcaggcacgttgcttttcgcaactttgcgagcacgtggtttgcgtaccagctggttaactgttgccattaaatagctcctggttttagcttttgcttcgtaaacacgtaataaaacgtcctcacacaatatgaggacgccgaattttagggcgatgccgaaaaggtgtcaagaaatatacaacgatcccgccatcaccaggccatctggctggggtgcttaaccgtaagtctgacgaaatcagtatagtcaatgagaatgatgtcgttgctaatttgaccagtcaaaccgcgggcaataaggtcttcgttcagggcatagaccttaatgggggcattacgcagactttcaaggtagcggttaccgtcaactgcggcagttacgccatcttgcaataatagcagttcgtctccttcactgagcagacgcagcagcgcagcaaaatccgtcagccagggactgcgatgtaatgtgtgcagcataaacgcctcaaaacctcaaaataacatcgtagttggcgagttcgcggcgtaaggcatctgcttcgagcggcgtggcttcgacaacaaagggtgtctgcggatctaacccgcgttcgcgcagactagccgcacaaacccagcactgttcaatgtcgtacagacccaacaatttaaaagtggcaatgtaatcacgcgccagcactgcatcgggcttttgtcctggcagcagctgaaaaacgccatcagctataaagaagacagccagatcgtcagttaatgcggaagttgccagtaaagcatctaaaccttcccggcctgcggctgtaccatgaggtgcagtagaaaaaacaaacgcaattcgtttcatcagaactgtaccaccctgtcacaggtcaggctggcttccgccagcgccccaagtccgcttaaggtaaatccctgctgaaggttactgctagccagccccagtcttccggcctccgtttcatcaacaacgccacggcgtaatgctgccgctacgcagatattcagcgccacaccatgttgcgcattcagttgttgccaggcccgtacgaggtcaaattcgtcacttgccggagaggtcaattggttagcgttatagaccccttcccgatagaaaaagacgctgcttaactcatggccatctgctatcagcgcctgcgcaaactgaaaagcactactcgcctgttgcgtaccgtatgctggcccggtcaccacgatggcaaaacgcattacttatcttgcccctggaaatcaccgctcttgaactggcggatgtagagatagacagtgtgtttggagatgttcaggcggtcagcaacctggttgatcgcatctttaatatcgaagatccctttctcgtagagattcagcacgatctgacgatttttggcgttattagaaacattgcgatcggcattcacttcttcgatggtgaactccagcgtttgggtaaccagatcttcaacagaagaggcaaagttgacgctactaccgacatccggggtttctggcggcacaaaggtgctcataatctggctgaagggaacatcaagattcatattgatgcacagcagaccaattacacgctgttcgcggttacgaatcgcgatagtcagggacttcattaatacgccgcttttggcgcgagtaaagtagcatttagaaacgctgctatccgctcccgtcatatcgtgcagcatacgtagcgccaggtcagtaattgggctaccaatcttccggcctgtatgttcaccgttagcaatgcgaatggcactacattttagatcctgcaaagagtgcaaaacgatttcacagtgggagccaataagcatcgctaacccgtccaccaccgcttcgtaggatttcagaatatcaaaatcggtctggtcgaaaggacgttgatccagtaaatccaactcactggtttcgttggttaaaaggctcctggacatgaaaaaaaacactccttttcaggagcctgtcgttaacttttcagggcaggctcattaatgatgcgggtaactaaattaatacagcggaggttccgctttccagcactaattatatccggcctgtaataaaaaaaccgccgcctggtcaggcggcggttcttaatgcttattttttagcagaatctgcggctttcgcatcagcttccggctttgcatcagccttcggcgctggtttcacatccagcagctctacgtcaaacaccagggtagaattcggtgggatccccggaacacccgctttgccgtaagccagttctggtggaataaccagtttgatcttaccgcctttcttgatgttcttcagaccttctgtccaacccgggataacaccgtccagacggaaagaaagcggttcaccacgggtgtaagagttgtcgaactctttaccgtcgatcagcgtacctttgtagttcactacaacagtatcgctgtctttcggtgcttcgcctttaccggcttctactacctgataaaccagaccagtactagaggttttcacacctttctctttggcaaatttctcgcggtactctttaccttttgcttcgttatcagccgcgtctttttccatcttcgcctgagcagaagacttcacgcgagcttcgaatgcttgtagagtctgttcgatctcttggtcggagagtttgcttttatcagcaaatgcatcctgaacaccagcgatcagctgatctttatccagtttgatgcccagtttttcttgttcttttagagagttttccatgtaacgacccaggctggcacccagtgcataagcacttttctgatcgtcatttttgaacgctgctttgctgtcagcagctgtagcaggttttgcagcttcagcagcaaaagtgattggtgcatgcagggcaacggccattgtggtcgccagcagcgttactttaaacagacttttcatccatatctccaggatcggggcatctcaccccagggttaactattatcagaagggtactataaagcgttgtcgaacaaatctacatacagacacgccctattatcatctattttcagactctttttgtttaaattagtttcgatgaccgcgaaatgagtgctgtctcgggcagcaaagttaagtagaatccgcggcgaccattcgacaaaagaggtgaatcatgcaggatttaagtttggaagcacgcctggcagagctggagagccgactggcttttcaggaaatcaccattgaagaactgaacgtcacggtgaccgctcatgaaatggagatggcgaaactgcgcgatcatctgcgtctgctgaccgagaagttaaaagccagccagccgagcaacatcgcgagccaggctgaagaaacgccaccgccacattattgaggcgtaaaaaaagcggggattccccgcttttttgtcactttttcggtattagtggcaaccgcaaccgccgttgcctttaccgccacagcagccttcgccaccgtgttcatgaccgtgatcgtggccatgaccgccgcagcaaccgtcgtggtcgtgatcgtggtggtgatcgtgcgcgccgtgaacgtgaccatgagccagttcttcttcagtcgcttcgcgaatcgccacaacttcaacgttgaatttcaggttctgaccggccagcatgtggttaccatcaaccacgacgtgatcgtcttcaaccgcagtgatttcaaccggtaccggaccctggtcggtttcagccaggaaacgcatacctacctgcagttcatcaacgcccataaatacgtctttaggaacacgttgcaccaggttttcgtcgtactgaccgtaagcgtcgttcgcgccaacagcgacatcaaatttgtcgccaacttcatgaccttccagcgccgtttccaggccagagatcagggaaccgtgaccatgcaggtagtccagcggcgcactcaccggagactcatcaaccaacacaccgtcttctgtacgtacctgataggccaggctgaccaccaggtcttttgctactttcatgatatctcctgagcatgggaagaatagtggcgcagattgtagcggaattctgcagccgtgtactcactagcttaaaaaaactcggcgcatatcgttagtccggatgaaaaatcccgatcacttgctcatctttgcgaacgtgatcgcgggcttctttgtctgcttctcgcatctgatgtccgcacttaacacattcaacaatatcaatattattttcgcgccacatcgccatactatcctgcgcctgacaggccgggcattttgcgcccgcaataaaacgttttcggattgccatctttaccctttactcaaattcatcccagccgtccagctggcgtcgttcttgttgcatttcacgctggaaaatctcttccagttcgcgtcgggcttccctggcgcgagaaatttgtacggtatcggcatgcattgggatgagctctcgcagcatccgcatatccaggcggcgaaaatgcagttgcgctcgctgtgcctgatgcggatgcatgccaagcgtgaccagcgtcttgcgccccagctctaacgcactggagaatgtttcacgggaaaactgcgtcacccctgcctgtaataactcatgcgcttccacacgtccgcgcgctcgcgcaagaatatgcaaatgcggaaagtgctgttggcatatttccaccagcttcatggtgtcttccggctcgttacaggtaatgacgatagactcagcggcctctgcacccgcagaacgtaaaagatcgacctgcgtggcgtcgccgtaataaactttgtagccgtatttacgcatcaggttaacggcgctgatatcccgctccagcacggtaatgcgcattttatttgccatcagcaaacgaccaatcacctgaccaaaacgcccgaagcccacgacaatgacctggggtttatcatcgttgacccacggtttttcgtcttcttcttccggtccgttaaactggcgggatagccatttatccaccagcttcatcagcaacggcgtggtcatcatggaaagcgtcaccgtcaccagcaacaacgccatctggtcgccctggaataagcgttgactagaagcggtagaaaagaggacaaaggcaaactcaccaccctgactcaacacgccagcaaactgcatccgctcactgctacgcacgccatacaatcgcgccagcagatacagcacgagaattttcaccgccaccagcacaaccacgcttatcactacccacaacagatgggtataaagcaccccgaggttgagactcatgccgacagagataaagaacaaaccgagcagcaagcctttgaagggatcgatagccgtttccagttcatggcgatattcactttccgccagcagcacgcccgcaataaatgtaccgagcgccatgctcagccccagcgcatccataaacaatgcggaacccaacaccagcagcagcgtcgcggcggtgaacacttcccgcacgccagaagctgcaataaagcggaataccggacgcagtaaatagcgcccaccaatcagcatgccgacaaacgccagcaccttcatgccgaccttcatccagtcgaaatgttcgtctgcgctccccgccaacaacggcactaacgccagtgctgggattactgccagatcctgaaacagcagaacgctaaacccgagctggccggattcgctgcgattcatccctttctcacgcatcaattgcaacgccattgcagtactagacatcgcaaggccaatgccaccgaccaccgccgcctgccaggcgaaatccgtcagcatcaataatcccgccagcaacgccgcgcttaacagcacctgtgccgcgcctacgccaaaaatgctacgccgcagttgccaaagtttggagggattcaactcaaggccgatgataaacatcaggaataccacgccgagttcgctaaagtggaggatctcatcgacgtcgctaataaaccccagcccccacgggccaattgcaatccctgccagcaaatatcccaacacagcgccaatacccagccggcttgccagcggcaccgcagccaccgccgcgaagagaaacagcactcctgcgagtaaaaaatcggaaccttccatcagcggcctcctggagacagcggatttgccagccagtcaccgtaggctctggcgtggctcgccagctcctgtgcgctttgccgtctcgcccagtaaataatgatgggacttaaccaatgcatccggcacatgcccgccgccagttcaaaggggcgcagcacatcgctcatcgggtagcgattcagcgcgtcataacggtaagcactttccggctcgccggtggtaatcacgctacgccagtactttcccgccagttggtttcctcccggcccgctggcaaaaccacgacttaatacccggtccagccactctttcagtagcgccgggcagctataggtataaagaggatgctgaaagacaatcacctcgtgctcgcgcagtaatgcctgctcacgggggatatcaataaaaaaatcgggatagtgcgcgtaaaggtcgtgcacggtaacattgctgagctgcgtggccggtttaagcagtacccggtttgccacgctgtcctgagattccggatgggcatacagcagcaaaactttcgctggctgagacatcatccccctcccggtatggtttttgtgtatagtcgctgttttgggctaccattgcgcccggtgcggcagctcgcccatacattacattatcataatgataagttaacatagtctgaacatacggcaccttatgattgttttctccagcttacaaattcgtcgcggcgtgcgcgtcctgctggataatgccaccgccaccatcaaccctgggcagaaagtcggcctggtgggtaaaaacggctgtggtaaatctaccctgctggcattgctgaaaaatgaaatcagcgccgacggcggcagctacacctttccgggaagctggcaactggcgtgggtgaatcaggaaacgccggcgttaccgcaagcggcgctggaatatgtcattgacggcgaccgtgaatatcgtcaactagaagcgcagctacacgacgccaacgaacgtaacgacgggcacgccattgcgaccattcatggcaagctggatgctattgacgcatggagtattcgctcccgtgctgccagcctgctgcacggcctcggtttcagcaatgaacaactggagcgcccggtaagtgatttttccgggggctggcgtatgcgtcttaaccttgcccaggcgctgatttgccgtagtgacttgctgctgctcgacgaaccgactaaccacctcgatctcgatgccgttatctggctggaaaaatggctgaagagctatcagggcacgctgatcctgatctctcacgaccgcgacttcctcgatccgatcgtcgataaaattattcatatcgaacaacaaagcatgttcgagtacaccggcaactacagtagctttgaagtacagcgcgccacccgtctggcgcagcaacaagcgatgtacgaaagccagcaggaacgcgtagcgcatctgcaaagttatatcgaccgtttccgtgccaaagccaccaaagcgaagcaggcccagagccgcattaagatgctcgagcgtatggagctaattgcccccgcgcacgtcgacaacccgttccgctttagcttccgcgcgccggaaagcctgccaaatccgttactgaagatggaaaaagtcagcgcgggctatggcgatcgcattattctcgacagcattaaactgaacctggtgcccggcagccgtattggtctgttaggccgcaatggcgcgggtaaaagcacattaatcaaactgttagccggtgaacttgcgccagtcagcggtgaaattggtctggcgaaagggatcaaactcggctacttcgcccagcatcaacttgaatacctgcgcgccgacgaaagtcctattcaacatctggcacgtttagcgccgcaggagctggaacaaaaactgcgtgactacctcggcggctttggtttccagggcgataaagtaaccgaagaaacgcgccgcttctccggtggggaaaaagcccgcctggtgctggcattaattgtctggcagcggccgaatctgctgctgctcgacgaaccgactaaccaccttgacctcgacatgcgtcaggcactcaccgaagcattaatcgagtttgaaggcgcgctggttgtcgttagccacgaccgtcatttgctgcgttccaccactgacgatctctacctggttcacgatcgtaaagtcgaaccgttcgacggcgatctggaagattatcaacagtggttgagcgacgtacaaaagcaggaaaaccagaccgacgaagcgccaaaagagaatgcgaacagcgcccaggcacgtaaagatcagaagcgtcgggaagctgagctgcgtgcgcaaacccagccactgcgtaaagagattgcccgtctggaaaaagagatggagaagctgaacgcgcaactggcgcaggcggaagagaaactcggcgacagcgaactgtatgaccagagccgtaaagcggagttgaccgcctgcctgcaacagcaagccagcgccaaatccggcctggaagagtgcgaaatggcatggctggaagcccaggagcagcttgagcagatgctgctggaaggccaaagcaactgatggcgcagataacgacgaccgatgccaatgaattcagcagcagtgctgaattcatccccatgcgcggctttagcaattgtcatctgcaaaccatgctgccgcgtctgtttcgtcgtcaggtgaaattcaccccgtactggcagcggctggagttgcccgacggcgattttgtcgatcttgcgtggagtgaaaaccctgcacaggcgcaacataaacctcgtctggtggtgtttcacgggctggaaggcagtctcaacagcccttacgcccacggtctggttgaggcggcgcaaaagcgcggctggctgggcgtggtgatgcattttcgcggatgcagcggtgaaccaaaccgtatgcaccgcatttaccatagcggcgaaaccgaagacgccagttggtttttacgctggctgcaacgcgaatttggtcatgcgccaacggctgccgtcggctatagcctcggcggtaatatgctggcctgtttgctggcaaaggaaggcaatgatctcccggttgatgcggcggtgattgtctctgcgccgtttatgctggaagcctgtagctatcatatggaaaagggcttttcccgcgtttatcagcgttacttgctgaacctgttaaaagccaatgccgcgcgcaagctggcagcctaccccggaacgctgccgattaatctcgcgcagttaaaaagcgtacgtcgcatccgtgaatttgacgatctcatcaccgccagaattcacggctacgccgacgctatcgactattatcgtcagtgtagcgccatgccgatgctgaaccggatcgccaaaccgacgctgattattcacgccaaagacgatccgtttatggatcatcaggtgatcccgaaaccggaaagtctccccccgcaggtggagtatcaactgactgaacatggcggtcatgttggctttattggcggtacattacttcatccgcaaatgtggctggagagtcgcattcctgactggttaacaacgtatctggaggcgaaaagttgttgatattaacgtatctggaggcgaaatcatgttgattccgtggcaagacctctcccccgaaacgctggaaaatttaattgaaagctttgtgttacgtgaaggcaccgattatggtgaacatgagcgtacacttgaacagaaagtcgccgacgtcaaacgccagctacagtgcggagaagcggtgctggtatggagcgagctgcacgaaacggtcaatattatgccgcgcagtcagtttcgcgaataacctgcaaccgtcggcggacgagataataatgatagctaagtcatggagttactatgtctgccaaacatccggtcattgcggtaacaggatccagcggcgcggggaccaccaccaccagcctcgcgtttcgtaaaatattcgcgcagttaaatctgcatgcagctgaggtggaaggcgacagttttcaccgttacacccgcccggaaatggacatggcgatccgcaaagcgcgcgacgccgggcggcatatcagctacttcggccccgaggctaacgacttcggcctgctggaacaaaccttcattgaatacggtcagagcggcaaagggaaatctcgcaaatatctgcatacctacgacgaagccgtaccgtggaatcaggtaccggggacattcaccccctggcaacctttaccggaacccactgatgtactgttttatgaaggtttacacggcggcgtagtcacgccacagcataacgttgcgcagcatgtggacttactggtcggcgtggtgcctatcgttaaccttgagtggattcaaaaactgatccgcgacaccagcgagcgcgggcacagtcgagaagcagtgatggacagtgtagtgcgtagtatggaagactatatcaactacatcacaccgcagttttcccgcacccatcttaacttccagcgcgttcccaccgtcgacactagtaacccgttcgcggcaaaaggtatcccgagcctcgatgaaagctttgtggtgatccattttcgtaatctggaagggatcgatttcccctggctgctggcgatgttgcaaggcagtttcatttcccacatcaatacgttagtggtaccgggcggcaaaatgggtctggcaatggaattaattatgctgccgctggtgcaacgattgatggaaggaaagaaaatcgagtaactctgctattacgccggataaaatactatccggcttcacaacgggatagttaagtcacgcggcaaccacttcatagctgtgagtaatattcaccgctttttccagcatcaacgccacactacaatatttctcggcagagagatcaaccgcacgcgcaaccgctgcgtctttcaggtcgcgaccggtgacgataaaatgcagattaatgtgcgtaaacaggcgtggtgcctcttcgcggcgttcagaggtcaattttacttcacaatcgaccacatcctgacgccctttttgcaggatgctaaccacatcgatggcactgcaaccacccgccgccatcaacaccatttccatcggacttggtgctttatcgccactgttgccgtccattaaaatctgatgaccagaggcggattcgcccagaaaagttaacccttcgacccacttcactcgcgcttgcatttttgctactccactgcgtcaattttcctgacagagtacgcgtactaaccaaatcgcgcaacggaaggcgacctgggtcatgctgaagcgagacaccaggagacacaaagcgaaagctatgctaaaacagtcaggatgctacagtaatacattgatgtactgcatgtatgcaaaggacgtcacattaccgtgcagtacagttgatagccccttcccaggtagcgggaagcatatttcggcaatccagagacagcggcgttatctggctctggagaaagcttataacagaggataaccgcgcatggtgcttggcaaaccgcaaacagacccgactctcgaatggttcttgtctcattgccacattcataagtacccatccaagagcacgcttattcaccagggtgaaaaagcggaaacgctgtactacatcgttaaaggctctgtggcagtgctgatcaaagacgaagagggtaaagaaatgatcctctcctatctgaatcagggtgattttattggcgaactgggcctgtttgaagagggccaggaacgtagcgcatgggtacgtgcgaaaaccgcctgtgaagtggctgaaattagctacaaaaaatttcgccaattgattcaggtaaacccggacattctgatgcgtttgtctgcacagatggcgcgtcgtctgcaagtcactagtgagaaagtgggcaacctggcgttcctcgacgtgacgggccgcattgcacagactctgctgaatctggcaaaacaaccagacgctatgactcacccggacggtatgcaaatcaaaattacccgtcaggaaattggtcagattgtcggctgttctcgtgaaaccgtgggacgcattctgaagatgctggaagatcagaacctgatctccgcacacggtaaaaccatcgtcgtttacggcactcgttaatcccgtcggagtggcgcgttacctggtagcgcgccattttgtttcccccgatgtggcgcagactgatttatcaccccgatatcaactatgcacttcgacaaacgctggtgctatgtttgcccgtggccgttgggttaatgcttggcgaattacgattcggtctgctcttctccctcgttcctgcctgttgcaatattgcgggccttgatacgcctcataaacgttttttcaaacgcttaatcattggtgcgagcctgtttgccacctgtagcttgctgacacagctactactggcaaaagatgttcccctgccctttttgctgaccggattaacgctggtacttggcgtcactgctgagctggggccattgcacgcaaaattgcttcctgcaagcctgctcgccgccatttttaccctcagtttggcgggatacatgccggtctgggaaccgttgctcatctatgcgttgggcactctctggtacggattgtttaactggttttggttctggatctggcgcgaacaaccgctgcgcgagagtctaagtctgctgtaccgtgaactggcagattattgtgaagccaaatacagcctgcttacccagcacaccgaccctgaaaaagcgctgccgccgctgctggtgcgccagcaaaaagcggtcgatctaattacccagtgctatcagcaaatgcatatgctttccgcgcaaaataatactgactacaagcggatgctgcgtattttccaggaggcgctggatttacaggaacatattagcgtcagtttgcatcagccggaagaggtgcaaaagctggtcgagcgtagccatgcggaagaagttatccgctggaatgcgcaaaccgtcgccgctcgcctgcgcgtgctggctgatgacattctttaccatcgcctgccaacgcgttttacgatggaaaagcaaattggcgcactggaaaaaatcgcccgccagcatccggataatccggttgggcaattctgctactggcatttcagccgcatcgcccgcgtgctgcgcacccaaaaaccgctctatgcccgtgacttactggccgataaacagcggcgaatgccattacttccggcgctgaaaagttatctgagtctaaagtctccggcgctacgcaatgccggacgactcagtgtgatgttaagcgttgccagcctgatgggcaccgcgctgcatctgccgaagagctactggatcctgatgacggtattgctggtgacacaaaatggctatggcgcaacccgtctgaggattgtgaatcgctccgtgggaaccgtggtcgggttaatcattgcgggcgtggcgctgcactttaaaattcccgaaggttacaccctgacgttgatgctgattaccaccctcgccagctacctgatattgcgcaaaaactacggctgggcgacggtcggttttactattaccgcagtgtataccctgcaactattgtggttgaacggcgagcaatacatccttccgcgtcttatcgataccattattggttgtttaattgctttcggcggtactgtctggctgtggccgcagtggcagagcgggttattgcgtaaaaacgcccatgatgctttagaagcctatcaggaagcgattcgcttgattcttagcgaggatccgcaacctacgccactggcctggcagcgaatgcgggtaaatcaggcacataacactctgtataacagtttgaatcaggcgatgcaggaaccggcgtttaacagccattatctggcagatatgaaactgtgggtaacgcacagccagtttattgttgagcatattaatgccatgaccacgctggcgcgggaacaccgggcattgccacctgaactggcacaagagtatttacagtcttgtgaaatcgccattcagcgttgtcagcagcgactggagtatgacgaaccgggtagttctggcgatgccaatatcatggatgcgccggagatgcagccgcacgaaggcgcggcaggtacgctggagcagcatttacagcgggttattggtcatctgaacaccatgcacaccattagcagcatggcatggcgtcagcgaccgcatcacgggatttggctgagtcgcaagttgcgggatagcaaggcgtaatgcaggctaaaccatcggataaggcattcacgccgcatccgacatcttttgcctgatgcttcgtatttacgccccaaccaccttcgccaccgcgtgggcgaaacgttgcatcccttcatcgatatccgcatcttccaccaccaggctcggtgcaaaacgcatcacatccggtccggcattcagcaccattacgccagcctctgcgcccgcatacaggaaatcacgcgcccgacctttgtactgtggtttcagctctgcgccaatcaacagccccataccgcgaatatcgctaaatacatcgtactgctgatcgatcttctgcagatggtcaacaaaacgctggcgtttcgcctgaatgccttccagcacttcaggggtattgatgatatcaaacgccgcccccgctactgcacaggccagaggattaccgccgtaggtggaaccgtgagaaccaggatgaaacgcagaagcaatttccgccgtggtcagcatggcgctaatcgggaagccgccgcctaacgctttcgcagaggtcagaatatccggcgtaacgccgtagtgcatgtaagcaaacaaatcgccggtccgccccatcccgcactgcacttcatcaaacaccaataatgcctgatgttgatcgcacagctcgcgcaagccctgcaaaaactctggcgtcgctgccgtcacaccgccctcgccctggatcggctcaaccaccaccgcacaggtgtgatcatccatcaccgctttcactgcatggagatcgttaaagggaacgtggatgatgtctgccggtttcggcccaaagccgtcggaatattttggctgcccacccacgctaacggtaaacaggctgcgaccatgaaaagcgttatggaaggcaataattttggttttgaacgggctatgacgcacacaggcgtaatggcgtgccagtttaaaggcggtttcgttagcttccgtgccggagttcataaacaccacgcgttcggcaaacgttgcctcaatcagtttacgcccaagacgcagcgccggttcattggtgaaaacgttactgatatgccacagagtttcgccctgggtttttaacgcgttcaccagcgcaggatggcaatggcccaacgccgtaactgcaatgccacccgcgaaatcgacatactccttgccttgctgatcccagattcggctgccctgaccttttaccggaataaactctgccggagcataaatcggcaggatcacttcatcgaaagtcgcgcgtgtaattgctgtttgttcaattgccatctcatgatcaccctgttacgcataaacaaatgtgaaattataaccacaaaatatgcataaaaaatcactaaatggcaatcagaaatcagcgatgcaggaaattagccagcagttgatgtccttgttcgctaagaatactttctggatggaactgcacaccttccagatcccactggcgatggcgaatccccataatctctcgggtttcgctccaggccgtcacgtcaaagcacgctggtaaactgtcaggttccaccaccaggctatggtagcgtgtcacggtaagtggatttgccagcccccgaaatacgccctcaccgttatgtgtaatcgggctggttttgccgtgcatgacctttgcggcgcgcacaactttaccgccaaatgcctgcgccattgcctgatgaccgaggcagacgccaagaatcggcaagcgcccggcatagtggcgaataacgtcaagggagatcccggcttcatctggcgtacaggggccaggactgatgacaattttttgtggtttaagggcgtcgatatccgccagcgtcaacgcatcgttgcgcttaaccagcacatccgcccccagttcacaaaagtactggtagaggttccaggtaaaagaatcgtagttatctataagcaggatcatggcggctccggtacaaaagaaccgcgctattttactcagattccccggcttcgcttaccactttgctaaatatcatctgcagtgcggtgagatcccccattgccccactctgatttgcctgattccaggcctctttttcgataccctgccagctcagttgatatccggcatgaatcgccagttgctcgaagaagatccgctgtgccagaccacttcccacccggaagggatgcagcacgttgatttcacaatagtaatgcgccagccgctcgacgaacttcgctttctccaggccaaccagataaccttcttcctccagatcctgcatcagggcattgccctctttttcgatataagcaaagtggcagaacggcgtatcaccctgataaatatcaacttcacgcagttgccctgcccagtcgaaaatatcctgatacagctggcgatggatagttcgcaaatgcggtaaaccgcgcaccagcggaccaagctcaatggtcgcagcacgcagcgccgtcatttcgtaagcggcctgttccagccgctgctgctggcggatgttcagccggttacgcatgatatcaaggcctggataaagatacggatcgcgcccttcgccgaatttatcgctcatagtgactcctcagctcttcaaggcgcgctaaagcctctgcggcagtaagagtgactaaaggcatctcgacgccttcaagacggcgactggcctgaaaattacgattacgctgaagctcccagagacgggacttttgcttatcggtgagtttcttcacttgatgcctccctgaacgtgtccatttgccacaagtataagcggcaaatccgggttacgccgggagagcagaagcgcgggcaagattgcccgcgcgagaaatcattacggcaggactttagcggaaaggataactaccggtttactcggcacattctggtacggaccaacgtcatgagtcggcacctgggaaatcttatcggcaacgtccatgcctttcaccactttaccaaataccgcgtaaccgaaatcacgctgaccatggtcaaggaaggcgttatcggcaacgttgataaagaactggctggtggcgctgtctttgtcagcggtacgtgccatcgcgatggtgccacgcgtgttgcgcaggccgttatcggcttcatttttgattggcgggtttggttttttctgctgcatctgctcggtgaaaccgccgccctgaatcataaagccaggaatgacgcggtgaaaggtagtgttgttataaaaaccgctgttcacataatcgacaaagttttgcacagacactggcgctttttgtttatccagctccagttcgatgttaccagcactggttgtcaacaatacgtgcgggtcccctttcgctgccattgctgcgggagaaagagcagaaagagcgaaaacagcagccatcgccgccagggtgcttttgaacatgagatttccttaacaaacagagcagaaaaaaagcaagtgaagagattctaaatagccttcaagaacaaggccatccctttacctaattttacgtatctgaaatatatgtaacctgacgatcactttttattccgtgatcaaaatcacctcttaaaatgcaatttagcaaccgattgcaataaaacatttaaacagatcacaaaatcacctaaaatcgcccgctcgcggcatatcccgctatgccattttatttttgaacgcaggccaatcatgactaacagcaatcgcatcaagctcacatggattagctttctctcctacgcactgactggtgcgttggttattgtcaccgggatggtgatgggaaatatcgccgattatttcaatctgcctgtttccagtatgagtaataccttcaccttcctcaacgccggcattttaatctctatcttcctcaacgcctggctgatggaaatcgtcccgttgaaaacgcagttacgttttggctttctcctgatggtgctggcggttgccggtttgatgttcagccacagcctggcgctgttcagcgcggcgatgttcattctcggggtggtcagcggcatcaccatgagcattggtacattcctggtaacacaaatgtatgaagggcgtcagcgcggttcccgcctgttatttaccgactccttcttcagtatggctgggatgattttcccaatgatcgccgcgtttctactggcgcgcagcattgagtggtactgggtttatgcctgcatcgggctggtgtatgtcgctatttttattctgaccttcggctgtgagttcccggcgctgggcaaacatgcgccaaaaacggatgctccggtagagaaagaaaagtgggggatcggcgtactgtttctctctgttgcggcgttgtgctacatcctcggtcagttaggttttatctcctgggtgcctgagtatgccaaaggcctgggcatgagcctgaacgacgcgggcacgctggtgagtaacttctggatgagttacatggtcggcatgtgggcgttcagctttattcttcgcttctttgatttgcaacgcattctgaccgtactggctggtctggctgcgattctgatgtacgtctttaacaccggaacaccagcacatatggcgtggagtattctcgctctgggcttcttctccagcgcgatctataccaccatcatcaccctgggtagtcagcagaccaaagtaccgagcccaaaactggttaactttgtcctgacctgcggaaccatcggtactatgttgacctttgtggttaccggcccgatcgttgaacatagcggtccgcaggcggcactgcttacagcaaacggtctgtacgctgtcgtctttgtgatgtgcttcctgttaggtttcgtcagccgtcaccgtcagcataacaccctgacctctcattaattgctcatgccggacggcactatcgtcgtccggccttttcctctcttcccccgctacgtgcatctatttctataaacccgctcattttgtctattttttgcacaaacatgaaatatcagacaattccgtgacttaagaaaatttatacaaatcagcaatatacccattaaggagtatataaaggtgaatttgatttacatcaataagcggggttgctgaatcgttaaggtaggcggtaatagaaaagaaatcgaggcaaaaatgagcaaagtcagactcgcaattatcggtaacggtatggtcggccatcgctttatcgaagatcttcttgataaatctgatgcggccaactttgatattaccgttttctgtgaagaaccgcgcatcgcttatgaccgcgtacacctcagctcttacttctctcaccacaccgccgaagagctgagcctggtgcgcgaaggcttctacgagaaacacggcatcaaagttctggtcggcgaacgcgctatcaccatcaaccgtcaggagaaggtgattcactccagcgccggacgtaccgttttttatgacaagctgatcatggcaaccggttcctacccgtggatcccgccaatcaaaggttctgatactcaggactgctttgtctatcgcactattgaagacctcaacgccattgaatcctgcgcccgtcgcagcaaacgcggtgccgttgttggtggcggcctgttaggtctggaagccgcaggcgcgctgaaaaacttaggtattgaaacccacgttatcgaatttgcccctatgctgatggcagaacagcttgatcagatgggcggcgagcagctgcgtcgcaaaatcgaaagtatgggcgtgcgcgttcacaccagcaaaaacacccttgagattgtgcaggaaggtgttgaagcgcgtaaaaccatgcgttttgccgacggcagcgaactggaagtcgactttatcgtcttctctaccggtatccgtccgcgcgataagctggcaacccagtgtggtctggacgttgctccgcgtgggggtattgtcattaatgattcctgccagacttccgatccggatatctacgccatcggtgaatgcgcaagctggaacaaccgtgtatttggtctggtagcacctggctacaaaatggcgcaggtcgccgttgaccatattctcggtagcgaaaacgcctttgaaggtgctgaccttagcgccaagctgaaactgctgggcgtagacgtaggcggtattggtgatgcgcacggtcgcacgcctggcgcacgtagctacgtttacctcgacgaaagtaaagagatctacaaacgcctgattgtcagcgaagacaacaaaaccctgctcggtgcggtactggtgggcgataccagcgactacggtaacctgctgcaactggtgctgaacgctatcgaactgccggaaaacccggattccctgatcctgccagcacacagcggtagcggcaagccgtctatcggtgttgataaactgccggacagcgcgcaaatctgctcctgcttcgacgtcaccaaaggtgatctgattgctgccatcaacaaaggctgccacacagttgcggcgctgaaagctgaaaccaaagcgggtactggctgcggtggctgtatcccgctggtcactcaggtactgaacgcggaactggcgaaacagggcatcgaagttaacaacaacctgtgcgaacactttgcttatagccgtcaggaactgttccatttgatccgcgttgaaggcattaaaaccttcgaagaactgctggcgaaacacggcaaaggctacggttgtgaagtttgtaaaccaaccgtcggtagcctgctggcctcctgctggaacgaatacattctgaagccggaacatactccgctgcaggattctaacgacaacttcctcgctaacatccagaaagacggcacctacagcgtgatcccgcgttctccgggcggtgaaatcaccccggaagggctgatggcggtaggtcgtatcgcgcgtgaatttaatctctacaccaagatcactggctcccagcgtctggcgatgtttggcgcacagaaagacgatctgccggagatctggcgtcagctgattgaagccggcttcgaaaccggtcatgcctatgcgaaagcactgcgtatggcgaaaacctgcgtgggtagcacctggtgccgctacggcgttggcgacagcgtcggcctcggcgtggaactggaaaaccgctacaaaggcatccgtacgccgcacaaaatgaagttcggtgtctccggctgtacccgtgaatgtagtgaagctcagggtaaagacgtgggtattatcgccactgaaaaaggctggaacctgtatgtttgcggtaacggcggcatgaaaccgcgtcatgcggatctgctggcggcggatatcgatcgcgaaacgctgatcaaatatctcgaccgcttcatgatgttctacatccgtactgccgacaaactgacgcgtaccgcaccgtggttagaaaacctcgaaggcggcatcgattacctgaaagcagtgatcattgacgacaaactggggctgaacgcacatctggaagaagagatggcgcgcctgcgtgaagcggtactgtgtgagtggactgaaacggtcaatacgccgtctgcgcagactcgcttcaaacacttcatcaacagcgacaagcgtgacccgaacgtgcagatggtgccagagcgcgaacagcaccgtccggcaacgccgtatgaacgtatcccagtaactctggtggaggacaacgcatgagccagtggaaagacatctgcaaaatcgatgacatcctgcctgaaaccggcgtctgcgcgctgttaggtgacgagcaggtcgcgattttccgcccgtatcacagcgatcaggtgtttgcgatcagcaacatcgacccgttcttcgagtccagcgtgctgagtcgcggactgattgcggaacaccagggcgagctgtgggtcgccagcccgctgaaaaaacagcgttttcgcttaagcgacggcttgtgcatggaagacgaacagttttccgtcaaacattacgaagcgcgagtgaaagacggcgtggtgcagctgcgcggttaatgttttaacgggaggcgcaatgcctcccctttttgcatggtcctgtaataatcttcggtatattgcaggacattttttaaactttttgttttattttttgtttttattttttaaaggataatcaaatgtttacagacactattaataagtgtgcggctaacgctgcgcgcattgcacgcctgagcgcaaataacccgctcggcttttgggtcagctccgccatggcgggcgcgtatgtgggtcttgggatcatcctgattttcacgctcggtaatttgctcgatccatccgtacgccctttggtgatgggcgcgacctttggtatcgccttaacgctggtgattatcgccggttctgaactgttcaccggacacaccatgttcctcacctttggggtaaaagcgggcagcatcagccacgggcaaatgtgggcaatcctgccgcaaacctggctgggtaacctggtcggttccgtcttcgttgccatgctctatagctggggcggcggtagcctgctgccggtagataccagcatcgttcactccgtcgcgctggctaaaaccactgcaccggcaatggtactcttcttcaaaggtgcattgtgtaactggctggtttgcctggcaatctggatggcgctgcgcactgaaggggcggcgaaatttatcgctatctggtggtgtctgctggcatttatcgcgtccggctacgagcactctatcgctaacatgacgctgttcgcgctctcctggttcggcaaccacagcgaagcctacacgctggcgggtattggtcataacctgctgtgggtgacgctgggtaatactttaagtggtgccgtattcatgggattgggttattggtatgctacgccgaaagcgaatcgtccggttgcggacaaatttaatcaaactgaaacggctgccggttaattactaaggggtttttacgtggatcatttgcctatattttgccaattacgcgatcgcgactgtctgattgtcggcggtggtgatgtcgcggaacgcaaagcaaggttgctgttagacgcaggcgctcgcttaacggtgaatgcattagcgtttattccacagttcaccgcatgggcagatgcaggcatgttaaccctcgtcgaagggccatttgatgaaagccttctcgacacctgctggctggcgattgcagcgacggatgatgacgcgcttaaccagcgcgtcagcgaagccgctgaagctcgtcgcatcttctgtaacgtggtcgatgcgccgaaagccgccagctttattatgccgagcattattgaccgcagtccgctcatggtagcggtctcctctggcggcacctctccggttctggcacgcctgttgcgcgaaaaacttgaaagtctgctgccgttacatctgggccaggtagcgaaatacgccgggcaattacgcgggcgagtgaaacaacagttcgccacgatgggtgagcgtcgccgtttctgggagaaattgttcgttaacgaccgcctggcgcagagcctggcaaacaacgatcagaaagccattactgaaacgaccgaacagttaatcaacgaaccgctcgaccatcgcggtgaagtggtgctggttggtgcaggtccgggcgatgccgggctgctgacactgaaaggactgcaacaaattcagcaggcagatgtggtggtctacgaccgtctggtttctgacgatattatgaatctggtacgccgcgatgcggaccgtgttttcgtcggcaaacgcgcgggataccactgcgtaccccaggaagagattaaccagatcctgctgcgggaagcgcaaaaaggcaaacgcgtggtgcggctgaaaggtggcgatccgtttatttttggccgtggtggcgaagagctggaaacactgtgcaacgcgggtattccgttcagcgtggttccgggtattaccgcagcttctggttgctctgcctatagcggtattccactcacgcatcgcgattatgcccagagcgtacgcttaattaccggacacttaaaaaccggtggcgagctggactgggaaaacctggcggcagaaaaacagacgctggtgttctatatggggttgaatcaggccgcgactattcagcaaaagctgattgaacacggaatgccaggcgaaatgccggtggcaattgtcgaaaacggtacggcagtcacgcagcgcgtgattgacggtacgctcacacagctgggagaactggcgcagcaaatgaacagtccaagcctaattattattggtcgggttgttggcctgcgcgataaactgaactggttctccaaccattaatttaacccgggccagagaattctggccttcttaatgactctttttatatattcagcaaataaaacatagccccttaataaatattatctgctaatgggttatattcaccgttacagcgacttacaaaattaagtcattcgctcactgacgccaattaaatattcctgtatcgttcttaacgagcagtctgcttatattcatataatcaatgaatattaattaatatataatacatagggaatgtaaatgaacaaatttattaaagttgcactggtaggtgcagtactggctacgttaactgcatgtactggtcatattgaaaaccgtgataagaactgctcttacgactacctgctgcacccggcaatttctatttctaaaatcattggcggttgcggtcctactgcacagtaagtctctgacagaaatcggctaacaccggtttaattgcccgacgccctctggattttccgagggcgtatttgtttctatgtccttcttgcccccgcccgtaaaaatattttcactttaaattcaatttgataactacatccattagccacagcgcgatcctgtgcgaaattttgtgatcttcctccacattacataacatcatatgttgttatattcatcatgcattgtcatgttaccttttaaatgactgcaaactctcccctacaacgtattggacaagaaaaaggtatcgctatgggaagccaggaactccaacgcaagctcggattttgggccgttcttgcaatcgccgtcgggacaaccgtcggctccggtatttttgtatctgtgggtgaagtggcaaaagcagcgggcacgccgtggcttacggtgctcgcgtttgtcattggcgggttaattgtgatcccgcaaatgtgcgtctatgcggaactatccaccgcttatccggaaaatggcgcagattatgtttatctgaaaaatgccggaagccgaccgctggctttcctctccggctgggccagcttctgggccaacgatgcgccgagtttgagcattatggcgctggcgattgtcagcaatcttggctttttaacgcctatcgatccgttgctcggtaaatttatcgccgccggattaattatcgcctttatgttgctacacctgcgctccgttgaaggcggcgcagcgtttcagacgctaattaccatcgccaaaattatcccgttcactatcgtcattggccttgggatcttctggtttaaagcggagaattttgccgcccctaccaccactgcgattggcgcaacgggcagctttatggcgctgctggcggggatctctgccaccagttggagctataccggcatggcctctatctgttatatgaccggcgaaattaaaaaccccggaaaaaccatgccacgagcgctgattggttcctgtctgctggttctggtgctctacaccctgctggcgctggtgatttccggcctgatgcccttcgacaaactcgccaattctgaaacgccgatttccgacgccctgacctggatccccgcactcggcagcaccgctgggatctttgttgccatcacggcgatgatcgtcattcttggtagcctttccagctgcgtgatgtaccagccgcggctggaatacgcgatggcgaaagacaacctgttctttaaatgcttcggccatgtgcatccgaaatacaacacgccggatgtctccatcatcctgcaaggggcgctggggatcttcttcatcttcgtttccgatctcaccagcctgctgggttatttcaccctggtgatgtgtttcaaaaataccctcaccttcggctccatcatctggtgtcgtaaacgcgacgattacaaaccgctgtggcgtactccggctttcgggctgatgaccaccctcgccattgcgagtagcctcattctggtcgccagtacctttgtctgggcaccgattcccggccttatctgcgccgtcatcgttattgctactggtctgcctgcttacgccttctgggcgaagcgtagccgccagctcaacgctttgagctaatgttatctggagaaaataaaatgttggatattgataaaagcaccgtggactttctggtcaccgaaaatatggttcaggaagtggaaaaagttctcagccatgacgttccgctggtgcacgccatcgtggaagagatggtgaagcgcgacattgatcgtatttatttcgttgcctgcggaagcccactcaacgcggcgcaaacggcgaaacatctggcggatcgcttttccgatcttcaggtctacgccatttccggctgggagttctgcgataacaccccgtatcgcctcgacgatcgttgcgcagtaattggcgtttctgactacggtaaaaccgaagaggtaatcaaagcgctggagctgggccgggcctgcggcgcactcactgcggcgttcaccaaacgcgcggatagcccgattaccagcgcggcggaatttagcattgattatcaggccgactgtatctgggaaattcacctgctgctctgctacagcgtggtgctggagatgatcacccgcctcgcgccgaacgcggaaatcggcaagatcaaaaacgatctcaagcagttgccgaatgcgctcggtcatctggtacgcacctgggaagaaaaaggccgccagcttggtgaactggccagccagtggccgatgatttataccgttgctgcgggtccgctgcgtccgctgggttacaaagaaggcattgtaacgctgatggaatttacctggacgcacggctgcgtgattgagagcggagagttccgccatggcccgctggagattgtcgaaccgggcgttccgttcctgttcctgctcggcaatgatgaaagtcgccacaccaccgaacgcgccattaactttgttaaacagcgtactgacaacgtgatcgtcatcgattacgccgaaattagccaagggctgcacccgtggctggcaccgttcctgatgttcgtgccaatggagtggctctgctactacctgtctatttacaaagatcacaacccggatgaacgccgctattacggtggtctggtggaatattaatccctctcccggcccggcaacgggccggatttacgcaaggagttacccgatgaaaacaggtatgtttacctgcggccaccagcggctgcctattgaacacgcatttcgtgatgcaagcgagctgggttacgacggcatcgaaatttggggcggtcgcccgcacgcgttcgcgccggacttaaaagcgggcggcatcaaacaaatcaaggcgctggcgcagacgtatcagatgccgattatcggctatacgccagaaaccaacggctatccgtataacatgatgctgggcgatgaacatatgcgtcgcgaaagcctcgacatgatcaagctggcgatggatatggcaaaagagatgaacgcgggttatacgctgatttccgcggcccacgcgggctatctcacgccacctaatgttatctggggacggctggcagagaacctaagcgaactgtgtgagtacgcggaaaacatcggcatggatctaatcctcgaaccgttaacgccgtatgaaagcaacgtcgtgtgtaatgctaatgatgtgcttcatgcgctggcgctggtgcctagcccgcgcctgttcagcatggtcgacatttgcgcgccgtatgtccaggcggaaccggtgatgagttatttcgacaaactgggcgataaattacgtcatctgcatattgtcgacagcgacggggccagcgacacgcattacattcctggagaaggcaaaatgccgctgcgggaactgatgcgcgatattattgagcggggctatgagggttactgtacggtggagctggtgacgatgtatatgaacgagcccagactctatgcccgccaggcgctggaacgctttcgcgcgctgctgccggaggatgagagatgaaaaccctggcgacaatcggcgataactgcgtcgatatctacccgcaactgaataaagcgttttctggcggtaatgcggtcaatgtggcggtgtactgcactcgctacggcatacagccgggatgcattacctgggtgggtgacgatgactacggcacaaagctgaagcaggatctcgcccgcatgggcgtcgatatcagccatgtccatacgaaacacggcgttaccgcacaaactcaggtggaactgcacgacaatgatcgcgtttttggcgactacaccgaaggcgtgatggccgactttgccctgagtgaagaggattacgcctggctggcgcagtatgacattgtgcacgcggcaatctggggacatgcggaagacgcattcccacagctgcacgctgcgggcaaacttaccgctttcgacttctccgacaagtgggacagcccgctctggcagacactggtgccgcatctcgattttgcctttgcctccgcaccgcaagaagacgaaacgctgcgtctgaagatgaaagcgattgttgcccgtggcgcaggaacagtgattgtcacgctgggtgaaaacggcagcattgcctgggatggcgcgcagttctggcgtcaggctcctgaaccggtgacggttatcgacaccatgggtgccggagatagcttcattgccggattcctttgcggctggtctgcggggatgacattaccgcaggcgatagcgcagggaacggcgtgcgcggcgaaaaccattcagtaccacggtgcctggtaagtataacgttggcgtgagcatcttcacgccaacgtgctgttacttgccggaaaacgaccctataatccgagtaattcattctttatttcagggtcgattatgagtgctacggaccgctactctcatcaactcctctacgctaccgtccgccagcgactgctggatgatatcgcgcagggggtttaccaggccgggcaacagatccctaccgaaaacgagctttgtacacaatataacgtcagccgcattaccattcgcaaagccatcagcgacttagtggcagacggcgtactgatccgctggcagggaaaaggcacctttgtacaaagccagaaagttgaaaacgccctgcttactgtcagtggttttaccgattttggcgtcagtcaaggcaaggcgacgaaagagaaagtgatcgaacaggaacgggtcagcgccgcgccgttttgcgaaaagctgaacatccccggaaacagcgaagtgttccatctctgccgggtgatgtatctcgataaagagccgctgtttattgatagtagttggatcccgctgagccgttatcctgactttgatgagatttacgtcgaaggaagctccacctatcagttatttcaggagcgttttgacacgcgagtggtcagcgacaaaaagaccatcgatatctttgccgccacccgcccgcaggcaaaatggctgaaatgcgaactgggcgaaccgttgtttcgcatcagcaaaatcgcctttgatcagaatgacaaaccggtgcacgtctccgaactcttctgccgcgccaatcgcatcaccttaactattgataataaaagacattaaccgtaggccggataagatgcgccagcatcgcatccggcgatgctggcgcgttgaattttacatcccgtacgttcccctcaccctaaccctctccccaaaggggcgaggggaccgttcagtacggaatttagcttgacggtgctatccagcattaaatactggcaatactctcacgcaaaatccgcagcaccgtctcttcaccgctgcgattcgggttaatgcgaatcgcacaatgttcactttgtggattcgcctggcgaaacgttccggaaaggcgataaaagagcggcgggatttcatatttgctctctgcacccaccgggtaaggcaaggcaccgcgcttttgcgcctcttccagcactctggcggcaatcggctgatgaaactcgacaatcaacaccttgctctgcgcattagcaatcaccgcgcttttcacttccggcaccgcaccaccgttaagcaaagccagcaaccgttcagatacccctgcctgcaccgcgtgcatcactggcgcaaacaccagaccacgcaatacttccagcgcctgtgcgccctggatctggctaccgccggagtaaagcgtggcgcgaatacggttgataacatcagcatcgccgaccactgcaccaacaccctctggcccaaatagcttgaagcaggaaaatgtgctgacattcgcgccgcattcacagccgattcgagccaccttcatcaccgcatagttgtcatcggttaacgctggaacacctgccgcgcgcaacgttgccagcacatctgccagcacgtagctgtcctgcggctgctggcgcgtatgctgcaccagcgccgcatccggttgttgctcgtcgacgacctgcttcagtgcgctcaggtcattgaaatcaacagtaataagcgtcagccccatctgctcaataataacccgtgtcgtcgggtaaacaggcgcgtcatgcaccagaagacgctgccccggtttgagcaaagccgccagcccggcgcgaatcgcgccagtccccgcgtcctgcaccagcgccgcagcctgtgcgtgaaatgcatcagccagcacctgttccacacgctgggtaacgcgcggttgattcagtcctggcgttaagcctaaatcaccgccagtaagaaactcgctgccggggaaatggcgacaaatgctatccaccagcgcaaactgcttttgctgcgcctcaataatcgtcaggctttgcagaggaaacgtcttcataggtgccttccttaagccggaacgaacaggccaagccagtaaagaacattcagcagaataccggtgatcattactgccacgaccggtgccgccattttctgtaccggacggcccagggattcgttgaggaagtaaatggcaaccgcgatagagaatccggtataacccgccatcttaattgctgcgaaaatgctaccgaccagcagcgccacttccatcagcatattcatggcgttacggatgttatcgctcgcattacgcacgctcgggtagcgtcccagccatttgccgatgctacgaagcagcaagacttccgcgctaataaccactgcgcctaataccgctgcaaccatcggattcgggctgagatagtccaccgcataaacaaaggtaaagcccgcaactgcatacacacccgttgctaacgcggtggtggcaatcaacggcacaaaccccagtccgcgcataaattctgccagagccgcctgattaatcagcgtttggctttgttccggcgttacgcctgcggaatatgctttctccagtgtgaagatgctcacttcactgccagcaaaaatcttcatgctggcaacggcggcaatcaatgctcccacgatggcgatatagggtaagtttttgataatccgactcgtgcgttcttcaaacacgctaagcccgctggcatcaatgtcattttcatcacgatgacgcaggtcgtgagttatcgcgatccccagcagcatcaccatgccaataaagatttcgatggattcagggttaagatgtgggaaatagcgcacgactaccacacgggtcatcagtaccaccacggcggcgatcagactttgcttccagccaaactggtagaaaatcgccaccagcgggaacagtgcaaaagcactaaccaccgggctgcttaattcccccaggctacctaatacatccaccggcagcgcggtcagcagctggtttactggcaacaggcaagtaaggatcaacacgccccagatagcgccaagaccaaacgccatcaggctgtttatcgccaggacgccgaggatatcggtaggaagaaagagtaaccatgcgttgagcagcccggttttcagggtaaaagagatccccacgctggccacaaaaccaatgctcagaccaaaagcgatactccccgcctcgcgacggttcatatagccttcaatcagttgcggcaggatcgggcggatgccgtcatgaaaaacagccgcgctgcgatgcgccagaaggcttgtcatacccgtcaggcacgccaccacgataatctgaatatacagatccatagtcgtgccttttatttcagatggttaatcagcatcggaatcgcgtgttcgacgtgctcaacggaaaggccaaacgccacttttccttcagcgatcattttggcgatatgctcgtctttcgctttaatgcctggtttggcaatggtgcaacttttgttatagcctatcaccgcgatggcaatgctcaatgccgcgcccgcaccggtattacacgcgccgatgtaataatccagttgcccggatttcaccttcattgccgcttccatgtcgttgtgaatgaaaacttcaaaacagccaggagccgtcgcttcaatagtttttttaatctgctcacgctgtaagcctgcaacgccaatctttttcatgagtctgtccttattggaaaaattgagagggattttcacgtaacatcacatccacatcggcctgactgaatccactctggcgcaattgcggaataaaggtggttagtaaatagtcatagccataaccaccgttggcttttaaatgggagcggcgcgtaatatccatgctcagcatgacgcggttcagcaacccacggtcgcgtagcgcatgaagcatcgcaatacgcttttcgtccgggtagtaactgttcttgccgatggtgtcgaactgcacgtacgcgccgagatcgatcatcttcaaaatgttgtcgaggttgtctttcagatcgcagtgaccaacggtgacgcggctaagatcaaccccgtgggcttgtagcaacgccagttgctccagccccatcgtgctgaagctcgtatgcgtggagatcgggcgtccggtctggttatgcgccagcgcagcggcaataaataccttctcttccagcggcgtaatctttccttcgctggtgccgatctccgcgatgatcccggctttcagctccgtgccatcgataccctgttcaatttcatcgaccatctcctgcgccagttcctgcacgctgcgggtcgccacatgttccgggaaaaacgcgtcctggtaataaccggtacaggccaccacgttgatccccgtctcgcgcattacatcaagcataaattgcgcattgcgccccatgtaacggttggtcatctcaatcacattacgcacgccccgggtcatcaggtcgttcatctcctggcaaatgaacgcatactgatcaaggcggcagtccacgttgtttttaaagccggagagatcaatatgcagatgctcatgggcgagggtgtaacccgtcggatcaaaactcatagggtgtctcctgcaaaccggagggaggaaagaaaagagcgaccattttgtggcggtggcgcgcggaaaaattcacacacggtagcccccacatcagaaagcgtggtgcgcacaccgagctgcgtagcgatcatcccttgctgataaaccagcactggcaccacttcgcgggtatggtggctgtgaccaatggtcggatcgttgccgtgatccgccatcacgaccaggcaatcatctggctgcatcgcctcaacaagccgggcaaggttacggtcaacgacctgcaaacgttcggcataacgtgcgacgtcttctgcatgaccagcgaggtcggtttcctgaatgttggtgcaaataaacgccgtcggatgggtgttaaattcgttgagggtgatatccataatccgctggctatccaccagattttgccagctcacgccataaggattgttgacgatatctgccaccttacccaccagcacggttggcacgcctgcttcatacagtttttgtggcacctgcactttttcatcgacgccatagcccatatgcacgacctggaaaccgttgtcataagcgccagaacgcggcgcattgataccaataaagcgcccttctttgctttctgcggcatcgagaatgcgttgactgtcggttaacaggccaccaaatgtaatgacccgaccgacctgtacctgctcacgcacgatacgaccaattttgattgcgtcgtcaaaagagatcacagagagattggcggtaatgttatagacctggcctaaatccgcctcgagattatcgccaatcgcaaccgcctgattgacccacagaaattgcagatcatcgccacggcgctccacctgccagccagcggaaactaatgcctgctcaacacggtcaatcacatcgcgaaaaggcatccgcagcggcggtaacgggcgcgtgcctaaaatttcctgatgccccataaaggtatcgccaccttcatgttgcagctctgccacgccccaggttgcggaatcactcggctgcatatcgcctggcgcataacccaatgcgttgattagccccagcgtctccagcgttggtagctgcaaatgcggcaactggctcaggatgtgaccacatgtattcgctcccgcatcttgcggacgcaccagcgtgacatctttcattgcccctacgccaaagctatcaatcactaacaccacaaatcgcgccattacgcccccagagagtttccaagactgtcataacgaccgacgatttccggttcgccacgatgaataccggacaccagcaccacatcgctacgggtgacaaaaatctgcgtgcgaaaacagagcaccactgcactgcttaccggaaactcgcctgccagcggcagggtgtagtcgatactgctgtcatccacagttttgagattggtttcagtaatcttttgattttctggcgtaaacaccaacgcatgttgcgcatgaccacgacgatagtaaccgccgccgtagcagtagctgtcgccacggaaatgatgggagatttcacttaaccagagcatcgcgatacgttcaggctgatcgccctgctggtttgccggaatagtgcccgtcagcgcatgaccgggttcggcatgagtcacaccgtattgcgccagtaatggcaggctagtgcagctggtcgcactaggcgcgttcagttgctcaagtgcaataccagatttcgccagttgatcccgtgcctgtatcagcgtgtgaagattcggtgtcggcaaaacttttccgacagcctcatcccaaagcaggcaagggaaatgggtaagtccggctaaatgcagccctggcagattctggatttcggcgacaatctccggcaacaccttgagggcaaaaccgctctcctggcccggataaagaaaatcatcgtcgctataaactttaagcagcacagactggattcgcccggccttcaccgccgccgcagaaacttcccgcgctttgtcgagagtaaacacggtgatgacgtcggtgccctgttcaacggcgtcagcaacctgatgacaagggatttgtaccagatgcccctgatgcgccacaggcaaaccagcgcggcgcatgactcgcgcctctttgtaatccaccgccacaatgccgctgtagcctaatgccagcaatttttccgccagccacggattacgaccaaactgcttggtcatcagatacagttcaatgccgtaaagccgcgccgtctcaatcagccgcttaccgttttccagtatctgatccacgtcgatcacccagctgtccggggcgatcttgccctgctgccacaggcttagtgcggcggaaatcagcgccgggttctggcgtttcaatgcttctacaaacatcttgttgcctcgtttctgttccttgaattaaatattcatttttttgaatatttaggttgtgcgacgtggatttgtcgggagcttcaaacctcttcgttagcagccatccataatccataaaggttggccagcaaatagccttcttcacacgggttaacttccagtgcgaattccttcaacaacacctgatgcaattgcacaacggcttgccagtggctggattgcgccagttctgccagcaactcgttatccagcggctctatttcttcaccacggcgactgcgcatcagtgcactcgccatatgtgtcatcgccatcgttccttgctcactgcgcaccggcagatggcactctgtttccagtacgttgacgacctgcatcatgcctttgcagatgtccttatcaataacgcctgcctcgcaaagcaggttgagtctggtttccatatcagatgcctttcgtttaataactcggttcctgttccccactcactacccgttgttgatgggcgagcagggcgtgtttatctacaacggcacgcagcagttgttgcattgggtaatcatcgactcgcgtcaggaccacggcttcggtggcctgtaaaaatcgcggatcgtctgtgagcggcgtcgcctctaatcccagcatggtcagttcgttttccgccaccacgttccagatcaccgcatcgacatcgcctttaacaatgcgttgtaaactctcgtgataagagagatcgactcgttccacatcactaccgccaaaaaaaacatcggtcatgattttctgatccgcgctacggttatccagccccacgcgcttcacgtttgcggactcgcctttacggcaaatcaactggtgctcgccaacgtaggtgtgcggccccaactccagcgcgaggcataagcctttttgcgtgagataactttccgccgctagtcggctaaccaccgccatgtcatacacgccattaagcagacactccacgcgaatatccgcgccacgcatgtgcgcatagtaaaaaggaatgccatcaaactgggctttcaatccgctcgccaggccttcgtacaaacgggtatagggcaagggcattgcacataccacgttgttgatatccacatgagtcagcaatgctttgttatccatctcgaccagataactgccattgcgcccacggcgttcaatccgtatcgctccgctactttccagcgttttcaacgcggcctgcgtcaggccaacggaactacggcattcatttgccagctcatctatggttttcaatcgattaccgcacttttcacccaacaaataacgggccagcgtcgtgatgacgacgccttcttttttgataaacgttcgacgcataataaattttcagtaaattgaatatttatatcttcaggaatttgaagataaggcgcaacagcgagatgtggaaacggcgaggcacttcacattttttcggattattgcaaatgaggataaaaaaaccgggtttccccggtttcagagtgatgataaaagcaaaattgcctgatgcgctacgcttatcaggcctacatttccttgcaatatgtgcattactttgtaggccggataaggcgttcacgccgcatccggcatgaacaaagcgcaatttgccagcaatagtgaattacggcttcgccacaaaaccaatcgcttcgtacaccgcttttagcgtacgggaagcgtgcgcgctggctttttccgcgccatctttcatcacctgttgcaggaaggcttcatcgttgcggaaacggtgatagcgttcctgcaattcagtcagcataccggaaacggcatcagccacttcacctttcagatgaccatacatcttgccttcgaactgtttttccagttctgggatgctctggcccgttaccgcactaaggatatccaacaggttggaaacgcccgctttgttctgcacatcgtagcgaactaccggcggctcgtcggagtcagtgaccgcacgtttgattttcttcactacgcttttcgggtcttccagcaggccgataacgttattgcgattatcgtcagacttggacatcttcttggtcggctccagcaggctcattacgcgcgcgccagatttcggaataaacggctccggcaccttaaagatctcgccatacagcgcgttgaaacgctgggcaatatcgcggctcagttcgaggtgctgtttctggtcttcacccaccggtaccagattagtttgatacagcaggatgtccgctgccatcagcaccggatagtcaaacagaccagcgttgatgttctcggcataacgcgcagatttatctttaaactgcgtcatgcgactcagttcgccgaagtaggtatagcagttcagtgcccagcctaactgtgcatgttccggcacgtgggactgaacaaaaatggtgcttttctcaggatcgataccacaagccagatacaaggccagcgtatccagcgtcgctttacgcagcttctgtgcatcctggcgcacggtgatcgcgtgttggtcaacgatacagtaaatgcaatggtagtcatcctgcatgtttacccactgacgcagcgcacccatgtagttaccaatggtcaattcaccactgggctgtgcgccactaaaaacgatgggcttagtcatttttgctttcctgattttcgctatgcggaagccctaatgcgggcagaaggtcatttatagactgataaattacatcaggctggctgagatcgatagcctcgccgtagttatatccgtaggttaagccaacacttgggcaacctgccgcttttgccgcctgaatatcattgcgactgtcgccgacaaacagcatctgttgtggggcaattcccatccgctcagccaccagtaacagcgggtccggatgcggttttttgttttgcacatcatcaccaccaatcaccacgctgaagtatttggcgatatctaaggcttcgagcagcggcgcgacgaacggcgtcggtttgttggtgaccaggcctagcggcaggcctttagcctgcaacgcgcccaacgtatcggcaacgtgcgggaacaaaaacgtcccctcttcggcaacctcgccatagtagcgatcgaacagtttacgcagaatacgtacctgttcttctgccggaatgtcgtcatcaacgggcggtttacccattgttttacgctgagtcgcacgttcctgacgcgcccaggtcaatgcgcgctccatcagaacatctgcgccgttaccaatccaggtaataacgcgttcttcacctgcgacgggcaactccagcgcatacagcgccatatctaccgcagcagcaagaccaggagcactgtcgaccagcgtaccatcaagatcaaaagcgacgccgcgaatatcttcaaacttattcatgacttacctttgccagttcactgcgcatttcatcaatgacttttttgtagtctggctggtcgaagattgcgctaccggcgacgaacatatccgcgcccgccgcagcgatttcgccaatgttgttcaccttcacgccaccgtccacttctagtcgaatgtcaaagccagactcgtcgatacggcgacgtacttcgcgcagtttatccagtgtttgaggaatgaaagactgaccgccgaaaccagggttgacggacatcagcaggatcacatccagcttatccatcacgtaatccagatagctcagaggtgtcgccgggttaaataccagacccgctttacagccattttctttaatcagttgcagcgtgcggtcaacatgctcggaggcttctggatgaaaggtaatgatgctggcaccagcggcagcgaaatcaggcacaatgcgatcgacgggtttcaccatcaggtgtacgtcgataggggcggtaatgccatagttacgcaaggatttcagcaccattggcccaatcgtcagattgggaacatagtggttatccatgacgtcaaaatgcacgacatcagcgccagctgccagggcttttgcggtatcttcacccaggcgggcaaaatcagcgctcagaatactgggggcaatcaaatactgtttcatccgcttctccttgagaattattttttcgcgggactaacgactcctggtttgtacaaagccagcagttcgtccacctttttacgtgtgccgccgttgctgcttatactgcgtcgaactttgacgacatgcaattttgcgcgctgataccactcacgcgttaacatcgtatcgtgattggagatcagcactggaatatggcgctcaaccagaccttcggcgatctccgccagatgcgcttgttgttcaagcgtaaaactgtttgtgtgatacgccgtaaagttggcggtcgcagacagcggtgcataaggcggatcgcaatagacgacggatgcatcatctgcgcgcgccatgctatcggcgtaagactcacaatagaaaaaggcattctgcgctttttcagcgaagtgatacaactctgcttccgggaaatagggttttttgtagcggccgaacggcacgttaaactcaccgcgcagattgtaacgacacaggccgttgtaaccgtagcggttcaaatataaaaacagtaccgcccgacggaacggatcctggcttttgttgaactcttcgcggaactgatagtaaacctcggcgcaatttgtttcgggaacaaacagctcgcgtgcggcctgtacgtactcatcagtacgcatcttcacaatgttatagagactgatcaggtcgctattgatatcggcaaggatataacgagaaaagtcggtgttgagaaacacgctcccggcacctacaaaaggctcaaccagacattcgcccttgggcaaatgccgtttaatatcatcaagcaggggatacttgccccctgcccacttcaaaaaagcgcgatttttcttcatgctgactaactaattacaccttctccggctgtggagaaagctccgacagcatccagcgcttcaggcaactcccgcaacgataaaccattgcgggagataaccttgattacttcagatcggcctgtacctgacgcagcggtttcgcccacgggtttttggcctggacatctgctggcaatgtagataccgcttttttcgcctcttctttgctagcgtacacgccagaaaccaggacataccacggctgaccattacgcgtcgtttcatagacaacgtagtttttcagattctctttcttcgcccaaccgttcaggttgtcgtagttagaggaactgctcagctgcagagtgtaatggctggacggtgcgcttttcaagctaccaacattacctgcggtcttcgccccagcagcgggtgttgctgtggtttgcgccggggatgccgtctgtactggagccgtagtcgccgtctcttttggtgctggcgtagaagtcgcagccggtgccttcgtgctcgccacaggggcagctggttcagtacgcttcggcgtctgtgctaccggcttcggctccgttttcacggttgcttgcggttttttcggttcaatcaccgcctgctgacgagctgggcgcgtagtggacggacgttcagcggtttgcgttttcgccgtgtcacggcttgcattgccattgcgaacaggcgcaaccgttgcgggttcagtcggcaacgtggaattgaccgccacattgttcagctgttgctgattttgtggctgggtcagcgcattgttcaggtcaccctgcacttcaacacgttgttgaccatccgttgccaccggggtttgcccttgagtcggcgtagaagagatcggtggcagagaaacatcctgctgagtattttccgcagacgtggttcccggcgctggctgcacgccattcgcctgatcggtcgcattgccagcaagatcaatactcttctcgccagacgcggtttgatcgctggaagtggtgctgggggcttttagcgcagaaccgataccgatgatcaacagcagtagaaccagaatgccgacgcccatcatcatatactgacgagaagcgggtttactggctgcttttttgcgcttacgcggacgacgctctacgcgctcttcatccacggtttcatcttcggattcgtcaatttcttcttcgatttccggttcctcattgcgctctttttgcgcacgagtcggacggcgatcgtcagtgtcatcaagttcaatatcatcaaaattgatctgcggttcgccacgttcagtacgctcagaacgttcagaagattgacgagaacgaccagtacgacgatcgctgggatcgggtttcagctcgtcttctggtttgaattcatccatttaacaccccactaaaaggttaatgcttaccacgttgcaattaacctgaagctaatagaccgcttgataagcggcctgacctttcttgttgttacgcactttgacaatcggcaatggcgttaagaacaagctcgtggctaacgccgctgcgaacttcactcttaccaattgccaacggaagaattaagcgcatctctcccgcaaggactttcttgtcacgcagcatatgcggtaaatacgcctgcgcggacatttcgcgcggcccattgaccggtaacccagcccgcttgagcagggttataatacgctgcgtttcggcagaactaaactgcccgagacgttcgctcgtccgcgccgccatcaccatacccgcagcgaccgcttcaccatgtaaccaattgccataccccatttcagcttcaatggcatgaccaaaggtgtgtcccagattcagtaaagcacgtaacccggtttcgcgctcgtcggcggcgacaacttctgccttcagttcacaacaacggcgaatacagtacgccattgccggaccgtccagacgcaacaacgcatccagattctcttccagccagttaaaaaacgcaccgtcaagaataatgccgtatttgatgacttctgccagcccgctcgctaactcacgcgggggaagcgttttcagacagtcgagatccaccaccacactagcaggttggtagaacgcgccaatcatgtttttaccgaggggatggttgaccgcagttttgccgccaacggaggaatcgacctggctcagtaacgtcgtcgggacttgaatgaaacggacaccgcgctgataactcgccgccgcgaagccggtcagatcgcccactacgccgccgccaagcgccaccagcgtagtatcgcgaccatgcggtttttgtaacaacgccgtaaagacggtatcgagtacagccaggcttttatactgctcgccgtcagggaggataacgctatcgacgttaacacccgcctgttcaagtacgccgcggaccttatcgagatacagaggagccagggtttcgttggtgaccaacatgacctgctcgccgcttttcagcggtaagaaactagctggttcattaaacaaaccagatgcgatggtaattgggtaactacgttccccgagagtaacgacaatcctctccataacgcgacatccaccttaattactgtacccgcagacgagtgtatataaagccagaattagttgctttccagcatgtgaataatctggtttgcaaccactttagcgctttgatcatcagtacgaatggtcacgtcggcaatctcttcatacagcggattgcgttcattggccaacgcttccagaacttcacgcggcggtgtttcaacgtgcagcaacgggcgttttttatcacgctgcgtgcgtgcaagttgcttttcgatggtcgtttcaagataaacgacaacgccacgagcggaaagacggttacgcgtttcacgggatttcacagagccgccgccagtagccagcacaataccctgtttctcggtcaactcattgatgaccttttcttcgcgatcgcggaagccttcttcgccttctaaatcgaaaacccagcccacatcagctccggttcgtttctcaatctcttgatcggaatcgtaaaattccatattgagttgttgagctaactggcgcccaatagtgctttttccggcacccataggcccaaccagaaagatattgcgtttctctgccattttttcggtactactaagactattcgttaatgataaacccgcttcgctcagagagcgccgcaggacatgaactgaaacctcataagatattgcgagagtcagactgaaaattatctcaatactccagcgggtttggcaactgaataaatcacccatccctctgcatatctggtcgctgcaagcgcgctgccttgctaccaccgctctggcgataaatcaccgggtaagattagcgtaaaaaagacagcaaaatgccgcctgaatgataaatcatcatcatggaacgcaggcagcgaagagcaccaactctcaaatcggtactccttgtatgctaaatacctgcgcgcgtcaaatagatgaaacacgttcagcgtaaaaacattaccgcttttacggctgtttactcactggaaaccagtcgtggcgtgataaacaccactaactcgcgtcgttcatcttcttttccgtcatgacgaaatgattgcccgaaccagggaatgtcgccaagcaacggtacgctatcctgaccgcttttatttttacgggtaaaaatgccgcccagcgccaacgtttctccgcttttgacctcgacctgcgtttcgatctcctgcttatcaatcgccagcacttcgccatcggcctgctgtagcacctgccccggaacgttctggctgatgtgtaatttcagccggatgcgacctttttgtaacaccgtgggcgtgacctccatccccaggacggcctctttaaattccacgctcgtcgcgccactttccccgctggaaacctgatatggaatttcgctcccctgtttaatgctggcaggctgaagatgactggccagcagacgcggactggcgataatatccagctgctgtttttgttcgagcgcggaaagctcaagatccagcaagcgtccgttgatgcgcccaatgttaaaaccgacatgcgttgtcgccgtcgctacggagaggtcgctaccaagcgtggtgacttgcccaacgccaccagcgtgttgcgcatcggccagcgtccatttcacgcctaactcacgcaaacttttttcattaatggtgacaatatgcgcgctcagctcaacctgcccgaccggcagatccatttgcgctacccactgttcaagcgcgcttaacgccgttttgttatctcgtagcaaaaggcgattggtgcgtttatcgacggtcatactccctttggcactcagtagcttctcccccgctttcgccagttctcccgcgtcggcgtattgcagggttatactgcgattttccagcggcagatttgcctgcgcccgcgcctgctccgcctcctggcgggcgatattgttattctgccaggcaatggaatgcacactgagaatgttgccttcctgccgcgttatcagtccggcgcttttcactacagtttgtagtgcctgcttccagggaacatctgttagatgtaagctcaccgtaccgctgacgtctgggctcacgaccaggttcaacttctcctgttcagccagcgcctgcaacacctgagctaccggaacgtcatccaccatcagcgtcactttttgcggctttgccgcctgtacgccgggtatcagcatcaacagtagtgcggctatccattgcttcatttgtatctccttgccgttgccacaaccattgtggcggttcgcagtttgtcccggtacccagcgttagtacgtctggcgtcagctgtaaaattgtccagccgttttccagcacatcgttttgctgcacccgtcgccatttcttttgcccgtcttttattacaccgatgatgcgctcgcctcgccctaccatcccctgatagcgccactggctaagttcgctaatccggcatagatcttccggcggtttaaaagggtcacgcataccggttaaaaggcacaatgcaatacctgccaacaaccagcgtttaaccctcatgcggcgtctccagttgtagcgtgaacaaaagatcatcaccttccacgcttaagctaaaacggctcacgctgacgttgcgctctgccagccgtgtaaatgcgctcggcactgcttcccacagcgttttcaacgccaactcgcctccctgcgcggatggatgccaggaaaccagttgcgcgccggataactgaaaatccagtgggctaaagggcagcgttttttcctcgctgaagggagcggtgtctaccaggcgatacagtgcggcccactgctggtgatgacttgcccgtagtcgaattaatgcgtcgcgctcttcatggtgtgtgctactcagaaaaatgagcgtaactaacatcagcaaccagaatgcccagcaaagctggcggaggcggggacttgtggcgaaccaccagtcaaagaacatgttcatcgctaaccttccttgttaactgatactcaaattgccagcgtccctgcgcatcctgctgcgtggctccccgctgattgagatgaaaagatgcatcctggcggagactcgtttctagtgcgtttaacgcggtaatgcttgttgtcagccccttgatctccagcgttccctgctgccagcttatcgttgtcagccaggcgtgctcgggtaaaagcgccgccagtgcttccagcgcagattgccagtcgcgggtaaattgtcgctggcgctgccgttggctacgctgttcgcgtaactgctgttgctccagcaaacgtggcttcgttatctgtaagctgcgggcgagttgttgttccgcctgaagcaaaactgcgtctatgcgcgcttcggcgctgcctgtcagacgcagtattagcgttatcccgacggccagcagcagaggcgcaacgaacatcagcaaccagaaacgcagaaaagcggtccggcgttgctgtcgccagggcaaaaaattaattggcgggttcatcagtacgccttcccaagcgccagccccagcgcgatggcaaagtctccacctggcggcggtagcggcggctgacgaacagaaacggcctcccagggatcaaatccgccttcgccacatatcgcgacgctttcgggatcaacggataacgctgccgccagctccttcgcgctagtcatccccaccgccagtttgcgcccccagctatagcgcgtcgcccacagccactgttcgttatcacgccaggccagacattgctgatgagaaggtaaaaaaggcaggaatcgctgtaatgcactggcatccggggtgatcgcgctcacatgaacacgcaacctttctgccagagtaagcagcgttgccagctctttgctttgcgcggcagtcacgttataggcgggactgagactgtcttcgctgtaatcgaagcgcagggagtccggatccatatccagctcgcgggccatcgtcccactcagccaggccgtttgctcccgctcaccaagggacatgctcgggcgcggaaaactccgctgtaatgtgcgactggcgggaaacgccaacataatgtgatgacgctgcggcagttcgcgactccacggtaacaacgttttagccagctgctgcgcatcaacaatccgcccatctttgataatgtcgttctccagcggcaaccgccaccagcgttgcaaaaagcattcttttgcgccccgcacgatcgcaaccgctaccgcttcttgctgttgtaaatgcaaaccaatttgccagatcttaaatgccattgtgatgatctccttatcacccgtcactctgacgggtatatcaatgcgtctggcttgcctttatactaccgcgcgtttgtttataaactgcccaaatgaaactaaatgggaaatttccagtgaagttcgtaaagtattttttgatccttgcagtctgttgcattctgctgggagcaggcagcatttatggcctataccgctacatcgagccacaactgccggatgtggcgacattaaaagatgttcgcctgcaaattccgatgcagatttacagcgccgatggcgagctgattgctcaatacggtgagaaacgtcgtattccggttacgttggatcaaatcccaccggagatggtgaaagcctttatcgcgacagaagacagccgcttctacgagcatcacggcgttgacccggtggggatcttccgtgcagcaagcgtggcgctgttctccggtcacgcgagtcaaggggcaagtaccattacccagcagctggcgagaaacttcttcctcagtccagaacgcacgctgatgcgtaagattaaggaagtcttcctcgcgattcgcattgaacagctgctgacgaaagacgagatcctcgagctttatctgaacaagatttaccttggttaccgcgcctatggtgtcggtgctgcggcacaagtctatttcggaaaaacggtcgaccaactgacgctgaacgaaatggcggtgatagccgggctgccgaaagcgccttccaccttcaacccgctctacagcatggatcgtgccgtcgcgcggcgtaacgtcgtgctgagccggatgctggatgaagggtatatcacccaacaacagttcgatcagacacgcactgaggcgattaacgctaactatcacgcgccggagattgctttctctgcgccgtacctgagcgaaatggtgcgccaggagatgtataaccgttatggcgaaagtgcctatgaagacggttatcgcatttacaccaccatcacccgcaaagtgcagcaggccgcgcagcaggcggtacgtaataacgtgctggactacgacatgcgccacggctatcgcggcccggcaaatgtgctgtggaaagtgggcgagagcgcgtgggataacaacaagattaccgatacgctgaaggcgctgccaacctatggtccgctgctgcctgccgcagtcaccagcgccaatcctcagcaagcgacggcgatgctggcggacgggagcaccgtcgcattgagtatggaaggcgttcgctgggcgcgtccttaccgtagcgatactcagcaaggaccgacgccgcgtaaagtgaccgatgttctgcaaacgggtcagcaaatctgggttcgtcaggttggcgatgcatggtggctggcacaagtgccggaagtgaacagcgcgctggtgagcatcaatccgcaaaacggtgccgttatggcgctggtcggtggctttgatttcaatcagagcaagtttaaccgcgccacccaggcactgcgtcaggtgggttccaacatcaaaccgttcctctacaccgcggcgatggataaaggtctgacgctggcaagtatgttgaacgatgtgccaatttctcgctgggatgcaagtgccggttctgactggcagccgaagaacagtccaccgcagtatgctggtccaattcgcttacgtcaggggctgggtcagagcaaaaacgtggtgatggtacgcgcaatgcgggcgatgggcgtcgactacgctgcagaatatctgcaacgcttcggcttcccggcacaaaacattgtccacaccgaaagcctggcgctgggtagtgcgtccttcaccccaatgcaggtggcgcgcggctacgcggtcatggcgaacggcggcttcctggtggacccgtggtttatcagcaaaattgaaaacgatcagggcggcgtgattttcgaagcgaaaccgaaagtagcctgcccggaatgcgatattccggtgatttacggtgatacgcagaaaagcaacgtgctggaaaataacgatgttgaagatgtcgctatctcccgcgagcagcagaatgtttctgtaccaatgccgcagctggagcaggcaaatcaggcgttagtggcgaagactggcgcgcaggagtacgcaccgcacgtcatcaacactccgctggcattcctgattaagagtgctttgaacaccaatatctttggtgagccaggctggcagggtactggctggcgtgcaggtcgtgatttgcagcgtcgcgatatcggcgggaaaaccgggaccactaacagtagcaaagatgcgtggttcagcggttacggtccgggcgttgtgaccagcgtctggattggctttgatgatcaccgtcgtaatctcggtcatacaacggcttccggagcgattaaagatcagatcagtggttacgaaggcggtgccaagagtgcccagcctgcatgggacgcttatatgaaagccgttcttgaaggtgtgccggagcagccgctgacgccgccaccgggtattgtgacggtgaatatcgatcgcagcaccgggcagttagctaatggtggcaacagccgcgaagagtatttcatcgaaggtacgcagccgacacaacaggcagtgcacgaggtgggaacgaccattatcgataatggcgaggcacaggaattgttctgattaaaaaggcgcttcggcgccttttcagtttgctgacaaagtgcacttgtttatgccggatacggcgtgaacgcgttatccggctaacaaaatcgtgaaaactcaataaattgcagaaaccccataagcctgataaacattgtgcatcaggcaaacttcacgcatttacactcgcccctgccctttcaaccattcgcgcacgaggaacagcgcactgacattgcgcgcttcattgaagtcagggtcttccagcaaatccatcatatgcgccagcggccagcgcacctgtggtagcggctctggctcatcgccttccagactttccgggtagagatcttgcgctaccacgatattcattttgctggaaaagtaagacggtgccatgctgagcttcttcaaaaaagtcagatcgttcgctccaaatccaacctcttcttttagctcgcggttagcggcttcgtagacgctttcacccggatcaattaatcctttgctaaaacctaattcgtaggattcagttcccactgcgtattcgcggatcaggatcaggtgatcgtccacaatcggcacaatcatcactgcttcccggttggttggacgcattcgttcataaacacgccgcacgccattgctgaactccagatccacgctctcgacggtaaacagtcgggaacgggctacagtttcaacattcagaatggtgggtttttgtaaacttttgctcatcgtgggatctatgctgtgaaatcagcggttattgtgcgatatcggacacgctttcggcaatgtgaattgcatgttatttacatttatgtaacttaataaataatcgtcctcaaatcaaattaaaagtcaataggttgaaataactccaggaatttgctgatattccgccttcagagggtttgctatgatcagcggttactgtgatgtgcttaatgatgctcaagttaaactccacgcttgccgatagccaaccgcagaatcatgtattgtgtccggtgcgactgaccacgcctgacagactaagtaagatggggaaagcatgagcaccattgtgatttttttagctgctttgctggcctgcagtctacttgcgggatggctgataaaagtgcgatccagacggcgtcagctgccctggaccaacgccttcgcggatgcgcaaacgcgtaaactcacacctgaagaacgtagcgccgttgaaaattatcttgagagcctgacgcaggtattacaggtgcctggcccaacgggagccagcgcggcaccgatctctctggcgctgaatgccgaaagcaacaacgtcatgatgctgacacacgctatcacgcgttacggcatctctaccgacgatccgaataaatggcgttactacctcgatagcgtagaagtccacctgccccctttctgggaacagtacatcaacgatgagaataccgttgaactgattcataccgatagcctgccgctggttattagtctcaacggtcatacgctgcaggagtacatgcaggaaactcgcagctatgccttgcaacctgttccgagtacgcaggcgagcattcgcggggaagagagtgagcaaatcgagctactcaatattcgcaaagaaacgcatgaagaatatgcgctgagtcgtccgcgcgggctgcgtgaagcgttgctgatcgtcgcctccttcctgatgttctttttctgcctgattaccccggatgtatttgttccgtggctggcaggcggcgcgttactgctgctgggcgcaggtctgtgggggctattcgcgcccccggcaaaatcctccctgcgggaaattcattgtctgcgcggtacaccccgtcgttggggattgtttggcgaaaacgatcaggaacagatcaacaatattagtctcggtattatcgacctggtctatcccgcacactggcagccatacattgctcaggatctcggtcaacaaaccgatatcgatatctatctcgaccgccatgtagtgcgtcagggacgatatcttagcctgcatgatgaagtaaaaaactttccgttacagcactggctgcgcagtacgattatcgctgcgggcagcctgctggtgctgtttatgctgttattctggatcccgctggatatgccgctgaaattcactctcagttggatgaaaggcgcgcagaccattgaagccaccagcgtaaaacaactggctgacgctggcgtgcgggtaggcgatacattgcgtattagcggtacgggaatgtgtaatattcgaacttccggaacctggagcgcgaaaaccaatagtccttttttaccgtttgactgcagccagatcatctggaacgacgcccgcagtttgccattaccagaatctgaactggtcaacaaagcgacggcattgactgaagcagttaatcgccagctgcaccctaaaccggaagatgaatctcgcgtcagtgccagtttacgtagtgcaattcaaaaatccggcatggtattgcttgatgattttggcgacattgtactgaagacagcggatttatgttctgccaaagatgactgtgtgcgactgaaaaatgcgctggtcaatctcggcaacagtaaagactgggacgcgctggtaaaacgcgccaacgccgggaagctcgatggcgtgaatgtgttattacgcccggtgagtgcggaaagcctggataacctggtggcaacctccaccgcgccgtttatcacgcatgaaacggcgcgagcggcacaaagtctaaacagtccggcccccggcggattcctgattgtcagcgacgaaggcagcgattttgttgatcagccctggcctagcgcaagtctttacgactacccgccgcaagaacagtggaacgctttccagaaactggcacaaatgctgatgcatacgccgtttaacgccgagggtatcgtcacaaaaatcttcactgacgccaatggtacgcagcatattggccttcatccgatcccggatcgttccggcctgtggcgctatctcagcaccacattgctgctactgacgatgctgggtagcgccatttacaatggcgtacaggcctggcgtcgttaccagcgtcatcgcactcgcatgatggagattcaggcctattatgaaagctgcctgaacccgcaactgatcacccctagtgaaagccttatcgaataacacgtttgcgcggcaggttatgctaccctgtcgcgcaaattgcttcactctggagatttccctcatgcatatcaacattgcctggcaggacgtagataccgttctgctggatatggacggcacgttgctcgacctcgccttcgataactatttctggcaaaagctggtgcctgaaacatggggcgcgaaaaacggggttacgccacaggaagcgatggaatatatgcgccagcaatatcacgacgtacagcatacgctaaactggtactgtcttgattactggagtgagcaactgggtctggatatctgtgcgatgaccaccgagatgggaccgcgtgccgtactgcgtgaagataccattccgtttcttgaggcactgaaagccagcggtaagcagcgaattttgctcaccaatgcgcatccgcacaacctggcggtaaaacttgagcataccggtctggacgcacaccttgatttattactttccacccacacatttggttatccgaaagaggatcagcggttatggcatgcggtggccgaagctacgggtctgaaagctgaaagaacgctgtttattgatgacagcgaagcgattctcgatgctgccgcgcaatttggtattcgttactgcctcggcgtgactaatcctgattccgggattgccgagaaacagtatcaacgccatccgagtctgaatgactaccgccgcctgatccccagcctaatgtgaaggagacgccatgaaagagaaacctgctgttgaggttcgactggataaatggctatgggctgcccgtttttataaaacccgcgcgctggcccgtgaaatgattgaaggcggtaaggtgcattacaacgggcagcgcagcaagccgagcaaaatcgtcgagctgaatgccacgctcactctgcgccagggaaatgacgaacgcacggtgattgtaaaggcgattactgaacagcgtcgccccgccagcgaggcagccttgctgtatgaagagactgcggaaagtgtagagaaacgcgaaaaaatggcgctggcacgtaaacttaatgccttaaccatgccgcacccggaccgacgcccggacaaaaaagagcgccgcgacctgttacgatttaaacacggcgacagtgaataactgtcacctgcaagagagatgattatgccgcaacatgaccaattacatcgctatctgtttgaaaactttgccgtgcgcggcgaactggtaaccgttagcgaaaccctgcaacagatccttgagaaccacgattatccgcagcccgttaaaaacgtgctggcagaactgctggttgcgaccagcctgttaaccgctacgctgaagtttgatggtgatatcaccgtacagctgcagggcgacggtccgatgaatctggcggttattaacggtaacaataaccagcagatgcgcggtgtggcgcgcgtgcagggcgaaattccagaaaatgccgacctgaaaacgctggtcggcaatggttacgtggtgatcaccattaccccgagcgaaggcgaacgctatcagggcgtagttggtctggaaggtgataccctggcggcctgcctggaagattactttatgcgttctgaacagctgccgacgcgcctgtttattcgcaccggcgacgtagacggcaaaccggctgcaggcggtatgttgttgcaggtaatgcctgcgcaaaatgcccagcaggacgactttgaccacctggcgacgctaaccgaaaccatcaaaaccgaagaactgctgaccttaccggcaaacgaagtgttgtggcgtttgtatcacgaagaagaggtgacggtttacgatccgcaggatgtggagttcaaatgcacctgcagccgtgaacgttgcgccgatgcgctgaaaacgctgcctgatgaagaagttgatagcatcctggcggaagatggcgaaattgacatgcattgtgattactgcggtaaccactatctgttcaatgcgatggatattgctgaaatccgcaacaacgcgtctccggcagatccgcaagttcattaatgagtatgtccggcagagagggctctgccggattttacgactaatacacctgatgcgctttgtcactcattcagattcacattcagcctttcaccatccactacaagatcgcgccacgctttaggcttcgtccccagttttccatccttcgcagctgtgagtaatttttctttcgttatttcgttcggaagtaaactcatatcaagcgcgtcccattcttttctgtcactgtcaaagccatagacaatgactctgtcatcattaaaagcaaacaggatccgctccgcctgaccatcactattcagatcttgctcgaccaggacgcaggcgtctttttcaatacaggtcatcacgttatagcgatcctggattaaggcgctccagaatgtcgcatcaggtttaacagaaccaggggcaattaacacattatcggctaatactttttcgcttacctgttgctgaagatgttgctctccatctaacgccatcagcagatcccgcgcgcgtttcgggtctttcataaacccggcatcgcttttcaggctctcaagcgcagcacgtccatagcgaccgctctgctcgagcatgtagatagttacctggtcactcgtgtttttgccgctctgataacgcgccatatggctgttcacgctaatgcgcatactgtccagcaccgggctattaagaagcaccagtatcaccaacaccaataagctaaccgcaaggttcactttgccctgaagaacaacgggattttgccctttacgccagacgatgctgacaaaataccccaggctccacaccagtaacaccagcaccgccagcacgccctgcaagcggtcgacagtccagccgtactgagcgacccgcagccataacgcccaggcggcgacgaacacatacagcggagcaaccagcaaagcggttttaatcaggcaacgcaacggccctgtccagggaagactcgctttttgcggatcgcggacaatagccattaagatcaattgcaaaaaggccagcgtcaacagcaacccggcggcggagatgtggcgagaaatcgcgctcaggcccgtaaacggcagggtgatgataaacatcagggttagcaaacttactaacggcagcaaccccgtggcgattaacgtgaacaacttttgaatagagtcgattaaacgactctgtgttcgcgcgaggatcaccgccagcgcggtaaccagacctaacgtgagataaataaaccagtcggttgcaaaaaagagcgtattgaaaaacgtgatgccaacaagtttaaacaactcactccacagtaaaagcaccagccacgtcaagccattggcgagaaaaatcaccagtaatataagtacgttatgccatacactctggtaaaaatagcgatagcggctactgtcattgcggatgcgaaggctttgttgtatccacggtagcaacaacattgccatcaacagcagatagcaaccaaaatcccaaagcgccttttcagctctccaggggttcatgccatcagtttgccacttcagccagccgctcatccccagcgtggcaataaacactagcgccagccatccccaaaggcgcttctgtttaaaagagatcacggagaagagtaaaacggaactaaacgcgacggtcgcaggcacgccataaacaatccaactgtgattttttccggaaagccaggcgatcagcaggtagcaaaccagaccctgaagtaatccggtagcaatcatcccccagcgtgttgcgggactaagttcaacgttatccatgttggttatccagaatcaaaaggtgggttaattatcgcatccgggcagtagtattttgcttttttcagaaaataatcaaaaaaagttagcgtggtgaatcgatactttaccggttgaatttgcatcaatttcattcaggaatgcgattccactcacaatattcccgccatataaaccaagatttaaccttttgagaacattttccacacctaaaatgctatttctgcgataatagcaaccgtttcgtgacaggaatcacggagttttttgtcaaatatgaatttctccagatacgtaaatctatgagccttgtcgcggttaacacccccaaaaagactttactattcaggcaatacatattggctaaggagcagtgaaatgcgcgttaacaatggtttgaccccgcaagaactcgaggcttatggtatcagtgacgtacatgatatcgtttacaacccaagctacgacctgctgtatcaggaagagctcgatccgagcctgacaggttatgagcgcggggtgttaactaatctgggtgccgttgccgtcgataccgggatcttcaccggtcgtagtccaaaagataagtatatcgtccgtgacgataccactcgcgatactttctggtgggcagacaaaggcaaaggtaagaacgacaacaaacctctctctccggaaacctggcagcatctgaaaggcctggtgaccaggcagctttccggcaaacgtctgttcgttgtcgacgctttctgtggtgcgaacccggatactcgtctttccgtccgtttcatcaccgaagtggcctggcaggcgcattttgtcaaaaacatgtttattcgcccgagcgatgaagaactggcaggtttcaaaccagactttatcgttatgaacggcgcgaagtgcactaacccgcagtggaaagaacagggtctcaactccgaaaacttcgtggcgtttaacctgaccgagcgcatgcagctgattggcggcacctggtacggcggcgaaatgaagaaagggatgttcagcatgatgaactacctgctgccgctgaaaggtatcgcttctatgcactgctccgccaacgttggtgagaaaggcgatgttgcggtgttcttcggcctttccggcaccggtaaaaccaccctttccaccgacccgaaacgtcgcctgattggcgatgacgaacacggctgggacgatgacggcgtgtttaacttcgaaggcggctgctacgcaaaaactatcaagctgagcaaagaagcggaacctgaaatctacaacgctatccgtcgtgatgcgttgctggaaaacgtcaccgtgcgtgaagatggcactatcgactttgatgatggtagtaaaaccgagaacacccgcgtttcttatccgatctatcacatcgataacattgttaagccggtttccaaagcgggccacgcgactaaggttatcttcctgactgctgatgctttcggcgtgttgccgccggtttctcgcctgactgccgatcaaacccagtatcacttcctctctggcttcaccgccaaactggccggtactgagcgtggcatcaccgaaccgacgccaaccttctccgcttgcttcggcgcggcattcctgagcctgcacccgactcagtacgcagaagtgctggtgaaacgtatgcaggcggcgggcgcgcaggcttatctggttaacactggctggaacggcactggcaaacgtatcagcattaaagatacccgcgccattatcgacgccatcctcaacggtagcctggataatgcagaaaccttcactctgccgatgtttaacctggcgatcccaaccgaactgccgggcgtagacacgaagattctcgatccgcgtaacacctacgcttctccggaacagtggcaggaaaaagccgaaaccctggcgaaactgtttatcgacaacttcgataaatacaccgacacccctgcgggtgccgcgctggtagcggctggtccgaaactgtaatgatttgaagctggagaatatctatccagtatcttatagaaagcaaaacgggaggcaccttcgcctcccgtttatttacccttcttttgtcgtgccctgcgcccgcgttaccggcactggcagccaggcgcgaatggaaagcccgccccgctcgctggtgccaagctccagcatcccgttatggttatccacgatacgctgcacaattgccagccctaatcccgtgccgctaatggtgcgcgcactgtcgccgcggacaaacggctggaacaggtgcttacgttgttccggcgcaattcccggaccgtcatcttccacctggaaccaggcgcgattcggctccgttccgctgctgactttgatccagccattgccataacgggcggcgttgaccaccatattcgccaccgcgcgtttgatgctcagcgggtgcattttcacttcaatgctgccggggtaaagcgcggtttcaatttcccgctcatagccactttcggcagcaatcacctcaccgagtactgcattaagatccgccatttccatcggcatctcctgcccggtgcgcaggtagtcgataaactgctcaatgatggcgttgcactcttcgatatctttattgatgctttctgccagatagccatcctgctcgctcatcatctcagtcgccaggcgaatacgcgtcagcggcgtgcgcaagtcgtgacttacccccgccatcagcagcgtgcggtcatccgccagttgcttaacaccagccgccatatggttaaaggcacgggtaacggaacgcacctcgctagcgccatactcacgcagcggcggcggaataatccctttaccaacctgcaaggctgcgtgttcgagatcgaccaacggtcggttctggatacgaataaacagccacgccccgcctatcgccaatagcataatcgccagcgtatagcggaacagcggagagaaatcgccctgatgaatttcggtcagcggcacgcgtacccagatattggggctcagccaggttttcagccagacgacagggctacttttgttgacctcaacgcgcacttccgtcgggccgcccagttgctgcgccatctgatggcttaagaattcatagtgttgcgcccaacgcagacctgcctcttcggcagcctcgttggagtagagagagatccccagctcacggtagatctcccgacggaaagcgggaggcacaaccaactgcgtgccgtcctccagttgcagtttgtcggtcatcaacatacgcacttcgtacgcgaggactttattaaactgctggaggctcggcaaaatcgcgaagttcagcaccaccagataagtcgtcaccaggctggcgaacagcaaggtgacgatgagcaataacgtacgggcaaaactacttcgtgggctgaagcgcaatcgcctcatgctttagagccgtccggtacaaagacgtagcccagaccccagacggtctgaatgtaacgcggatgcgctggatcttcttccaccatgcggcgcagacggctaatctgcacgtcgatggagcgttccattgcggaatattcacgaccacgggcaaggttcatcagcttatcgcgggagagcggctcacgcggatggctgaccagtgccttcagtaccgcaaactcaccgctggtgagcggcatcggctcgtcttcgcggaacatttcgcgcgtaccgaggttaagtttgaacttaccgaaagcaattaccgcctcttcctgactcggtgcgcctggcagttcgttcgcctgacgacgcagcaccgcacggatacgggccagcagttcacgcgggttaaacggttttggaatgtagtcgtcagcgccaatctccaggcctacgatacggtccacttcttcccctttcgccgtcaccataatgatcggcatcgggttgctctgactacgaagacgtcggcaaatgctcaagccatcttcaccaggtaacattaaatccagtaccataagatggaaagattcacgagtcagcaggcgatccatctgttctgcattagcgacgcttcgaacctggaagccttgttcggtgagataacgttccagcagcgcacgcaggcgcatgtcgtcatcgaccaccagaatcttgtagttctcttgcattgtttgtactcccaaaggttcgcaacaatttgtaagcgtgtattcttaaaaaagctcacgttcgtcaccagctaaatctggtatgaatttcagcctaaattgttacaaagcatattaaacagcagcttaagtatacaatttattcggcgaaacattattgattctgttgatatgatcacgttatacccaatgtgcgcattatcaaacagacaaagggaatcaacgagatgaaaacgcccctggttacccgggaagggtatgaaaaactcaaacaagagcttaattatctctggcgtgaagaacgcccggaggtcacaaaaaaggtgacctgggccgcaagtctgggcgaccgcagcgaaaatgctgactatcagtataataaaaagcgtctgcgtgaaatcgaccgtcgcgtgcgctatctcactaaatgcctggaaaatctcaaaatcgtcgattactcccctcagcaggaaggcaaagtcttttttggcgcgtgggtggagattgaaaacgacgatggcgtgactcaccgtttccgtattgtcggctacgatgaaatttttggccgtaaagattacatctctatcgattccccgatggcccgcgcattgctgaaaaaagaagtcggcgatctggcggtggtgaatacccctgccggggaagcgagctggtatgttaatgctatcgagtacgtgaaaccgtaaggaagagtcttaacctcctgccgatggctggcatttttgccagccagtccgtataactatcccctgatttttgatccgaaaagatgaactcaaaccatgatgaatgatagcttctgccgcattattgcgggtgaaattcaggcgcgcccggaacaggttgacgctgccgttcgcctgcttgacgaagggaataccgtgccgtttatcgcacgttatcgtaaggaaatcaccggcggtctggatgacacgcagctgcgtaatctggaaacgcgtctgagctatctgcgcgagctggaagagagacgtcaggcgatcctcaagtccatttccgagcaaggcaaactcaccgatgatctggcgaaggccatcaacgccaccctaagcaaaaccgaactcgaagacctctacctgccctacaaacctaaacgccgcacccgcgggcaaatcgccattgaagcagggcttgagccgttggctgacctgctgtggagcgatccgagtcacacgccagaagtcgccgctgcacaatatgtttatgccgataaaggcgtggcagataccaaagccgcgctggatggcgcgcgctatatcctgatggaacggtttgccgaagatgccgcgctgctggcgaaagtgcgtgattatctgtggaagaacgcgcatttggtttctacggtggtgagcggtaaagaagaggaaggggcgaaattccgcgactatttcgatcatcacgaaccgttgtccacggtgccttctcaccgcgcgctggcgatgttccgtgggcgtaacgaaggcgtacttcagcttagcctgaatgccgatccacagttcgatgagccgcccaaagagagctattgcgagcaaatcatcatggatcaccttggcctgcgcctgaacaatgccccggcggatagctggcgcaaaggcgtggtgagctggacgtggcgcatcaaggtgctgatgcatctggaaaccgaactgatgggcaccgtgcgcgaacgtgcggaagatgaagcaatcaacgtctttgcccgtaacctgcacgatctgctgatggcggcccctgccggactgcgtgcaacgatgggcctcgatccgggtctgcgtactggggtaaaagtggcggtggtcgatgccactggcaaactggtggcgaccgacaccatttacccgcacaccggacaggccgcaaaagcagcgatgaccgttgctgcgctgtgtgaaaaacataacgttgaactggtagcgatcggtaacggtacagcttcccgcgaaactgagcgtttctatctcgatgtgcagaagcagttcccgaaagtgaccgcgcagaaagtaatcgtcagcgaagcaggcgcgagcgtttacagcgcttccgagctggctgcacaggagttcccggatctcgacgttagcctgcgtggcgcggtgtctatcgcccgccgtttgcaggatccgctggcggagctggtgaaaatcgatccgaaatctatcggcgtaggtcagtatcagcatgacgtcagccagacgcaactggcccgcaaactggacgcagtagtagaagactgcgtaaacgccgttggcgtcgatctcaacactgcttctgttccgctgttaacccgcgtggcgggcctgacgcgcatgatggcgcaaaacatcgttgcctggcgcgatgagaacggtcagttccagaaccgtcagcaactgttaaaagtgagccgtctggggccgaaagccttcgagcagtgcgcgggcttcttgcgcattaaccacggtgataacccgctggacgcgtctaccgttcacccggaagcctatccggtggtggaacgcattctggcagcaacacagcaggcactgaaagatctgatgggtaacagcagcgaactgcgtaacctgaaagcgtctgactttactgatgagaaattcggtgtgccgacggtaaccgacatcatcaaagagctggaaaaaccgggtcgcgatccgcgtccggaatttaaaaccgctcagtttgccgatggcgtcgagacaatgaacgacctgcaaccgggtatgatcctcgaaggcgcagtgaccaacgtcaccaactttggcgcgtttgtcgatattggcgtgcatcaggacggcctggttcacatctctagtttgagcaacaagtttgtggaagatccgcataccgtggtgaaagcgggcgacattgtgaaggtgaaagtgctggaagtggatcttcagcgtaaacgtatcgccctgactatgcgcctggatgagcagcctggcgaaaccaacgctcgtcgcggcggcggtaatgaacgcccgcaaaacaaccgcccggcagccaaaccacgcggtcgtgaagcgcagcctgccggtaatagcgcgatgatggatgcgctggcggcggcaatgggcaaaaaacgttaaacgcccgtactggcctacggttcgaatttgcacgaaatcgtagggcagataaggcgttcacgccgcatctggcaacgaacgccttgcctgacataaaagtgccggagaatatctccggcatttttattccacagccaaactcataatatattccggcaatatttatcatttcattaacaactgaaaccttaattaaacattagccagtccgggtaattcactattcgaattatattttcgctgcgatataaccttgagccacatcaacattgagtcagattattattcaaaccaacattcgcacacattttaagtattgctgatagaaaccattctcattatcattgtgttgttgattatttaatctctcctttgttggcaaatcatctggtctcatgtcgctgtcaaacgccccatgaggtagttatccagttaatgagaaacaagtaggcacctatgcaatacactccagatactgcgtggaaaatcactggcttttcccgtgaaatcagcccggcatatcgccaaaaactgctttctcttggcatgttacctggctcctcttttaatgtggtgcgcgtcgctccactcggcgaccccattcatatcgaaacccgtcgtgtgagcctggtattacgcaaaaaagatctggccttattagaagtggaagcggtttcctgttaatacggtgataacaacaatgaaaaaattaaccattggcttaattggtaatccaaattctggcaagacaacgttatttaaccagctcactggcagtcgtcagcgtgtaggtaactgggctggcgttaccgtcgaacgtaaagaagggcaattctccaccaccgatcatcaggtcacgctggtggacctgcccggcacctattctctgaccaccatcagtagccagaccagcctcgatgagcaaatcgcctgtcactacattttgagtggcgacgccgacctgctgattaacgtggtggatgcgtctaaccttgagcgtaacctgtacctgacgctacaactgctggaactcggcattccctgcattgtggcactgaacatgctcgacattgccgagaagcaaaatattcgtattgaaattgatgctctgagcgcgcgtctgggctgtccggtgatcccgctggttagtacccgtggtcgcggtattgaagcgctcaagctggcgattgatcgctataaagctaacgagaatgtggaactggtgcattacgcacagccgctgctcaacgaagcagatagtctggcaaaagtgatgccttccgacatcccgctgaaacaacgtcgctggctgggcctgcaaatgctggaaggcgatatctacagccgcgcctacgccggtgaagcgagccagcatctggatgccgccctcgcccgtctgcgtaatgagatggacgatccggcgctgcacattgccgatgcgcgttaccagtgcattgctgccatctgtgatgtggtaagcaacaccctgacggcagaacccagccgtttcaccactgcggtagataaaatcgtgctcaaccgtttcctcggtctgccgattttcctctttgtgatgtacctgatgttcctgctggctatcaacatcggcggggcgttacagccgctgtttgacgtcggctccgtggcgctatttgtgcatggtattcaatggattggctacacgctccacttcccggactggctgactatcttcctcgcccagggcctgggtggcggcattaacaccgtgctgccactggtgccgcagattggcatgatgtacctgttcctctccttccttgaggactccgggtatatggcgcgtgcggcgtttgtgatggaccgtctgatgcaggcgctgggcttgccggggaaatcctttgtgccgctgatcgtcggtttcggttgtaacgtaccgagcgtaatgggtgcacgtacgcttgatgcaccgcgtgaacgtctgatgaccatcatgatggcaccgtttatgtcctgcggcgcgcgtctggctatcttcgcagtattcgcggctgccttcttcgggcagaacggtgcgctggcggtcttcagcctgtatatgctgggtattgtgatggcggtgctgactggcctgatgctcaagtacaccatcatgcgcggtgaagcgacgccgtttgtcatggagttgccggtctatcatgtaccacacgttaaaagcctgattatccagacctggcagcgtctgaaaggcttcgttctgcgtgctggtaaagtgatcatcatcgtcagcattttcctgagcgctttcaacagcttcagcctgagcgggaaaatcgtcgataacatcaacgacagcgcgctggcgtccgtcagccgggtgatcaccccggtcttcaagccaattggcgtgcatgaagataactggcaggcaacggttggcctgtttacaggtgccatggcgaaagaagtggtagtgggtacgctcaacaccctctacaccgcagaaaatattcaggacgaagagttcaatccggcagaatttaacctcggtgaagagctgttcagtgcgatagatgaaacctggcagagcctgaaagacaccttcagccttagcgtactgatgaaccccattgaagccagcaaaggcgacggcgaaatgggtaccggggcgatgggcgtgatggatcagaaattcggtagcgcagcagcagcttacagctacctgattttcgtcctgctgtatgtaccatgtatcagcgtgatgggggctatcgcccgtgaaagtagccgtggctggatgggcttctccatcctgtgggggctgaatatcgcttacagtctggcaacattgttctatcaggtcgccagctacagtcagcatccaacttacagcctggtgtgcattctggcggttatcctgtttaacatcgtggttatcggtctgctgcgccgcgcgcgtagccgggtggatatcgaactgctggcaacccgcaagagcgtaagcagttgctgcgcagccagcaccaccggtgattgccattaatggctagtcttattcaggtgcgcgatttgctggcgttacggggccgtatggaagcggcccagataagccagacattgaacactccacagccaatgattaacgccatgctgcaacaactggaaagtatgggcaaagccgtgcggattcaggaagaacctgacggctgcctctctggcagttgtaaaagctgcccggaaggaaaagcctgtctgcgcgagtggtgggcgctgcgttaaccttactccatcgcctgttttggaaagcccggtatgcgtctgcatccgggcttttttgcgtgcggctttccataaaaatgcaactcttgcagcacggcgtaagttcctttgaaagcatctcgcagggatgaaaactcgctaatacacaggtgtggagtggcgcgtagagtcgcggcattcaaacaacaggtgaaggaacgccatgagcaaaaagcagagttccaccccacacgatgcgctgttcaaactctttttacgccaaccggacacggctcgtgattttcttgcgtttcatttaccggcacccattcacgcgctttgtgatatgaaaaccctcaagctggagagcagcagctttattgatgacgatctgcgtgaaagctattccgatgtgctgtggagcgtgaaaacggaacaaggaccaggatacatctattgtctgattgaacatcaaagcaccagtaacaaactgatcgcatttcgcatgatgcgttacgctattgccgcaatgcaaaatcaccttgatgctggatacaaaacgttgccgatggtggtgccattgttgttttaccacggtattgaaagcccctatccctatagcctgtgttggctggattgtttcgccgatcccaaactggcaaggcagctttatgcctccgcatttccgctgattgatgtcaccgtcatgcctgatgatgaaatcatgcagcaccgacgtatggcgctgctggagttaattcaaaaacatattcgtcaacgcgacctgatggggctggtagagcaaatggcctgcttattaagtagtggatacgctaatgacagacaaatcaaagggctgtttaattacatactgcaaactggcgacgctgtacgttttaacgattttatcgacggcgttgccgaacgtagtccgaaacacaaggagagtttaatgactattgcggaaagattgcggcaggagggggaacaatccaaagccctgcatatagccaaaataatgcttgaatccggagttcctcttgcagacatcatgcgctttaccgggctgagtgaagaagagttggctgcggcgagtcagtaaagttctgtctcgccatttcaaaagccacttacaccctctgcttcaacgccaccagcaggtgacaaaactcggccggatggctaataaatggcgcatgggccgctttggcgaagatataactttcgctgtgaggccaaagtttatccagcatcggcaccactttgcgcggcaccagaccgtcgagatagccatacaatcgcaaaaacggcatggacacgttttgcagcggctgacggagatcgaccgttttcaggatttccagcccgccattaagcacgtcaacctccggcatcggtaacgccagaacggttttcttcaacgcccgcgcatcctggcgcgccgtttcagtccccatggtttgtaacgccaggaaccgctccactgtacgctgaaaatcatcactgagttgctgctgaaatcccgccagcacgtccggttttatccccggccactcgtcacgagcactaaaacaaggactgctcgccacggtgaccagcgcctgaacacgctcgggatgggttaacgcaatctggcttgccaccagcccgcccagactccagcctaaccaaatggctttatcaggtgcctgttgcagcacggcttcggccatatcagcaagactcagcgcaccaaatccccggctacgcccgaagccgggcaggtcaacaaggtgcagcgtaaaatggctgctaagttcctcgtcaatgcaacgccacacttcggcattcagtccccatccgtgcagcagcacaagatgaacattcccctgacctttggtctgccaccagatgttattcatccgctattgttctcttttgacttacaaggatgaacatatgctaacagtaccgggattatgctggctatgccgaatgccactggcgttaggtcattgggggatttgtagcgtctgtagtcgcgccacccgcacagataaaacgttatgcccacaatgtggattacccgccacacactcccatcttccctgcggtcgctgcctgcaaaaaccgccgccctggcaaagactggtcacggttgccgactatgcgccgccgttaagtccgcttatccaccagcttaaattttcccggcgcagtgaaatcgccagcgccctgagtcgtctgttactattggaagtcttacacgctcgtcgcaccaccgggttgcaattgccggatcgcatcgtcagcgttccgttatggcagcggcgtcactggcgtcggggatttaatcagagcgatttgctgtgtcagccgttaagtcgctggttgcactgccaatgggatagcgaagccgtcacacgtacacgggccactgcgacccagcattttctcagtgcccggctgcgcaagcgcaacctgaaaaatgcctttcgtcttgaattgcccgtgcaaggtcgccatatggtgattgtggatgatgtcgttaccaccggaagtaccgtcgcagagattgcgcagttgcttttacgcaatggtgcggcggctgtccaggtctggtgcctttgtcgaaccttgtaaagcctcgatgatgggcgtattataaccaactaaaatagtcaactattaggccattactatgatccgtatttccgatgctgcacaagcgcactttgccaaactgctggcaaatcaggaagaagggacacaaatccgcgtatttgtgattaaccctggcacgcctaacgctgaatgtggcgtttcttattgtccgccggacgctgtggaagccaccgacacagccctgaaatttgacctgctgaccgcgtatgttgatgagttaagcgcaccatacctggaagatgcagagatcgattttgttaccgaccagttgggttcccagttaacgctgaaagccccgaacgccaaaatgcgtaaagtggcagacgatgcaccgctgatggagcgcgtggagtatatgctgcagagccagatcaacccacagcttgctggtcacggtggtcgcgttagcctgatggaaatcaccgaagacggttacgccattctgcaatttggcggcggctgtaacggttgttccatggtcgatgtgacgctgaaagaagggatcgagaagcagctgctgaacgaattcccggagctgaaaggtgtgcgcgatctcaccgaacaccagcgcggcgaacactcctactactaagttatcccctcttttgtagattgcccgatgcgacgctaaagcgtcatttcgggcctacgttgaacatgtgccagacgttggcgcagcattgctttgtcaaatcctcggttcgtttccccgcgataatatgaccaacctctcataatttaaatttaccccgctctggtgattctcaaacgccagatgttacccgtatcattcacatgggtaccaaacatactcctgacatctgactacaataattagttttagtgggtatcagtcgtggtgccgcaatatctctgttcccgattgggataattagagtttgtcgtcagaaaattgacgttacccataacaaatgaaaggccaggtaaatcatgccattagtcattgttgctatcggtgtaatcttgttgttgctcctgatgatccgcttcaaaatgaacggcttcatcgctctcgtcctcgtggcgcttgctgttggattaatgcaaggaatgccgctggataaagttattggctccatcaaagccggtgtcggcgggacgctcggtagccttgccctgatcatgggttttggcgcaatgctgggcaaaatgctggcagactgcggtggcgcacaacgtatcgccaccacgctgattgccaaatttggtaaaaaacacatccagtgggcggtggtactgaccggttttaccgttggttttgccctgttctatgaagtgggctttgtgctgatgctgccgctggtgtttaccatcgcggcttctgcgaatattccactgctgtatgttggtgtaccaatggcggctgcactgtctgtgacccacggcttcctgccaccgcatccgggtccgactgcgattgccaccattttcaatgccgatatgggtaaaaccctgctgtacggtactattctggcaatcccgaccgtgattctcgccggtccggtttacgctcgcgtgttgaaaggtatcgataagccaattccggaaggtctctacagcgcgaaaaccttcagcgaagaagagatgccgagctttggcgtcagcgtctggacctctctggtgccggtagtactgatggcgatgcgtgcgattgccgaaatgatcctgccgaaaggtcacgctttcctgccggtagcggagttcctcggtgacccggtaatggcaacgctgattgccgtgctgattgcgatgttcacctttggtctaaaccgtggtcgtagtatggatcagattaacgacacgctggtttcttccatcaaaatcattgcgatgatgctgttgatcatcggtggtggcggtgcgttcaagcaggtgctggtagacagcggcgtggacaaatacattgcttccatgatgcacgaaaccaacatttctccgctgctgatggcctggagcattgctgccgtactgcgtatcgcgctgggttccgcaaccgttgcggcaatcactgcgggtggtatcgcggcaccgctgattgcaacgacgggtgttagcccggagctgatggttattgcggttggttccggtagtgtgattttctctcatgtgaacgatccgggcttctggctgttcaaagagtactttaacctgactatcggcgagaccatcaaatcctggagcatgctggaaaccattatcagcgtgtgcggtctggtaggctgtctgctgctgaatatggtgatttgataacactgactgccggatgcggcgtgaccgccttatccggcctacgattcgggatgaattagtaggccggataagacgcgtcaagcatcgcatccggcatcaaccgcactttacttcttcttcgctgcagctctgcgccgtctgtccaaatccttcagcaacttgttcacgccatcatcggcaaacatgctctcaagcgttgcggaaagcttgcgtcgccagtttttatactggtaactggtgccaggaatattcaccggttcggccatatccagccagtcttccggctgtagtcctaacagagcactgttactgtcggcaatgtagcgctgcaaaccacggttcagcgtcggcgtcatgctcatcaagcttgccttatgcccggcacgtttcggcagacaaccatatttatgcagtgcatccagcagcccttgcttcgccagttcgcgatcctgatacagaccgcgcagtaccacttcatccggatacagccccagggttttgcccagcgttagatccccgcactcccagtaaccgcgcagcgttggcaggtcatgtgtcgccgcaaccgccatgctctgctccggatacgctttcggtgcacggaacgtcttctcgtggtcgttttcgaaatagagcactttgtaagagtacacaccgctgctgcgcagcttaccgacaatctctaccggtacggtaccgagatcttcaccaatcaccatacagcgatgacgtttactttcgagtgccagaatgctgagcagatcatccaccggatagtgaacatacgcgccctgatctgccgtctcgccatacggtatccaccacaaacgcagcatgctcatcacatggtcaattcgtaatgcgccgcagttttgcatattggcacgcaacagctcgataaacggttcataggcacgcgcggtgatgatatgcgggtccattggcggtaatccccagttctgccccaacgggccgaggatatccggcggcgcgccaacgcttgctttcaggcaatatagttcacggtcacaccaggtttccgccccaccttccgctacgccaaccgccagatcacgatacaagccaatcggcatttcatagccctggcttatctcccagcaggcggcaaactggctgtaagccagccactgcaaccagagataaaaatcgacgtcatcacgatgttcttcgcagaactgacgcacttctggactatccacgttctgatacatctctggccatgcaggccagccccagcgcatttcgtcctctttcacttgctgggcatgtagcgcatcaaaggctgcctgccagaacaggctgtcgccctgctctgcaacaaactggcgaaacgcggccatctgctcatcatcacgttgcgcgaaacctttccacgccattcgtaatgctgtcatttttagggcggtaaccgtggagtaatcgacccagtcggcatcgcgcgcctgttgcagcgtctgttgcgtggtcggcaactgccaccaggcctgagcctcttcgctaagatggaaatcttcaacggcgttaacgtcgatataaatcacattcagccaacggcgagaagacgggctgtatgggctggcgctctccggatttgccggatagagcgcatgaatcgggttcaggccaatgaagctcccgccacgttttgccacatccaccagcatcgctttgagatcgccaaaatccccaataccccagtttttttcgcttcgcagcgtataaagctgaacgcaggcaccccacagcttttgtttattcagcaacgcctgcggttcgtaacagcgtttcggggcgacaatcacccggcaatgcgcgcgctggtcgtcctgggtgagtgtcagcgtgtgataaccttccggcagcttcgtcggtagattgaacgctttgccccccgttacatggcctttgtactgcgttccttcttcggtggtcagcagccagctatattcgccgctgccctccaccaccatcggcatttttttgccgctggtataaaccatgacattcgggactggcgttaccgccactttcgtggcggtacgttgatgcatcgcgtcaagcaaacgccgtttggtttcggcgctaatgctctgcggtttaccgtgggcattgatgtaattggggctaatccccgccgccagcgcggcattatccagacgtttgctttccatcgagcttccttagcgttttgcctgccagatacgagcctgataatcgcgaatagagcgatcgctgctaaacataccgcagcgggcggtattgaggatcgccgcgcgagtccaggcctcctggtcgcggtacagcacatccacctgcttttgtgcctctacataggctgcgaaatccgccatcaccagatacggatcgccgccctgtttgccgatactgtgcagcatctggtcgaaggcatgcttatcgccgtcgctgtatttaccgctttccagctctttcaatactgcgtccagcaccttatctttcttccgccatttcaccgggtcgtagcctttggccagaattgccttcacttgttccacggtatgaccaaaaataaagatattttcttcaccgactttctcggcgatttcaacgttcgccccatccagcgtaccgacagtaagcgcaccattgagcgccagtttcatattgccggtaccggaagcttctttacctgcagtgctaatttgttcggagatatccgccgccgggatcagtttttccgccgcgctaacgcaataatccggcaggaacaccaccttcaacttatcgccaaccagcggatcgttgttgatcacgtcagccactttgttgatcgcaaagataatattcttcgccaggtagtagcccggtgccgctttcgcgccgaagaggaagacgcgcggtacgcgatcagcctgcgggttttcacgaatttctttgtacaacgccagaatatgcagcagattcaggtgctggcgtttgtactcatgcaaacgtttgatctgaatatcgaaaatcgcctgtggattgatctcaataccggtacgaactttcacaaactccgccagacggactttattcgcctgcttgatctcgcgatattgctgacggaatttcgcatcatcagcgaatttttccagattgatcagctgatcgagatcgttagcccactctttttgcagacttttatccaacagagccgccagtgccgggttgcactgtttgatccagcgacgtggggtaataccgttggtgacgttatggaatttgttcggccatagctggtgatattccgggaacagatctttcaccaccagatcgctgtgcagcgccgcaacaccgttcaccgcgaaaccgccaaccacacacaggttcgccatatgcacttgtttgtcgtgcaccaccgccagtttggcccacactttttcatcgcccggccaggttttctctaccagcgttttaaagcgagtattaatttcgttaataatctgcatgtggcgcggcagtaagcctttcaccagtttcacatcccagcgttccagcgcttctggcatcagggtatggttggtgtaagcgaaagttttgctggtaatggcccaggcgtcatcccagctcatctggtgctcatcgatcagcacgcgcagcagttctggaatcgcgatagttgggtgggtatcgttcagctgaataacttcgtaatccgccagttcgtgcagtttacgccccgccagatgatggcgacgcaaaatatccgctacgctacaggcacactggaagtattgctgcatcaggcgcagctttttaccggcagtatggttgtcgtttggatagagaactttggtcagtttttccgcattgatgccctgctgttcggcacgcaagaaatcaccgtcgttaaatttagtcagatcaaacggatgcgcgtgcgtcgcctgccacagacgcagcggctgcgccacgccattacgatagccgacaacggggagatcccacgcttgaccggtaatggtaaactccggctcccagcgtccgtctttcgtcactttaccgccaatccctacctgcacatccagtgcttcgttgtggcggaaccacgggtagttactgcgatgccagtcatccggcgcttcaacctgtttgccatcgacaaaagactggcggaacaaaccatattgatagttcagaccgtaacccgtcgcagactgaccgacagttgccatactgtcgaggaagcacgccgccagacgtcccagaccaccgttacccagcgccgggtcgatctcttcttccagcaggtccgtcagattgatgtcataagccttcaagctatcctgtacatcctgataccagccgagattcaacaggttgttgcccgtcaggcgaccaatcaaaaactccatactgatgtagttaacatgtcgctgattcgccaccggcttggcgaatggctgagcacgcagcatttcggccagtgcttcactcactgctagccaccactggcgaggagtcatttcagccgcagaatttaagccataacgctgccactgacgactaagcgcttcctgaaattgcttatcgttaaaaataggttgactcataggagttccacttttcttagattttcaacacaacgttatcgctagtttgccaggctcgatgttgaccttcctcatcctgcgggggattaggcagggaggagttgcggggatgagcaaggaaatgtgatctcaaccacttaaagctagtgcaaaccacaggattagcatcaaatcaatgcaatacagcgcagaaaatctgtatctaagtgcaaaaaatggccgttgcgtattttcaaaaagcggaaggtaactctataaattaagtaaaggagtgaaacagtttcataagtaaaatatccagtgtgctccatctcattcttaatagatttattaagatcatctttttagatggcactttcatcaggaatgaagaagaaacccttgcttaaatgaatctgatgaacataagggaaaccagtattcacgctggatcagcgtcgttttaggtgagttgttaataaagatttggaattgtgacacagtgcaaattcagacacataaaaaaacgtcatcgcttgcattagaaaggtttctggccgaccttataaccattaattacgaagcgcaaaaaaaataatatttcctcattttccacagtgaagtgattaactatgctgattccgagtaaactaagtcgtccggttcgactcgaccataccgtggttcgtgagcgcctgctggctaaactttccggcgcgaacaacttccggctggcgctgatcacgagtcctgcgggctacggaaagaccaccctcatttcccagtgggcggcaggcaaaaacgatatcggctggtacagcctggatgaaggtgataaccagcaagagcgtttcgccagctatctcattgccgccgtgcagcaggcaaccaacggtcactgtgcgatatgtgagacgatggcgcaaaaacggcaatatgccagcctgacgagtctcttcgcccagcttttcattgagctggcggaatggcatagcccactttatctggtcatcgatgactatcatctgatcactaatccagtgatccacgagagtatgcgcttctttattcgccatcaaccagaaaatctcaccctggtggtgttgagtcgcaaccttccgcaactgggcattgccaatctgcgtgttcgtgatcaactgctggaaattggcagtcagcaactggcatttacccatcaggaagcgaagcagttttttgattgccgtctgagtagcccgattgaagccgcagaaagcagtcggatttgcgatgacgtttccggttgggcgacggcactacagctaatcgccctctccgcccggcagaatacccacagtgcccataagagcgcacgccgcctggcgggaatcaatgccagccatcttagcgattatctggtcgatgaggttttggataacgtcgatctcgcaacgcgccattttctgttgaaaagcgccattttgcgcagtatgaacgatgccctcatcacccgtgtgaccggcgaagaaaacgggcaaatgcgcctcgaagagattgagcgtcaggggctgtttttacagcggatggatgataccggcgagtggttctgctatcacccgctgtttggtaacttcctgcgccagcgctgccagtgggaactggcggcggagctgccggaaatccaccgtgccgccgcagaaagctggatggcccagggatttcccagcgaagcaattcatcatgcgctggcggcaggcgatgcgctgatgctgcgcgatattctgcttaatcacgcctggagtctgttcaaccatagcgaactgagcctgctggaagagagccttaaggccctgccgtgggacagcttgctggaaaatccgcagttggtgttattgcaggcgtggctgatgcaaagccaacatcgctacggcgaagttaacaccctgctagcccgtgctgaacatgaaatcaaggacatcagagaagacaccatgcacgcagaatttaacgctctgcgcgcccaggtggcgattaacgatggtaatccggatgaagcggaacggctggcaaaactggcactggaagagctgccgccgggctggttctatagccgcattgtggcaaccagcgtgctgggtgaagtgctgcactgcaaaggcgaattgacccgcagtctggcgctaatgcagcaaaccgaacagatggcacgccagcacgatgtctggcactacgctttgtggagtttaatccagcaaagtgaaattctgtttgcccaagggttcctgcaaaccgcgtgggaaacgcaggaaaaagcattccagctgatcaacgagcagcatctggaacagctgccaatgcatgagtttctggtgcgcattcgtgcgcagctgttatgggcctgggcgcggctggatgaagccgaagcgagcgcgcgtagcgggattgaagtcttgagctcttatcagccacagcaacagcttcagtgcctggcaatgttgattcaatgcagcctggcccgtggtgatttagataacgcccgtagccagctgaaccgtctggaaaacctgctggggaatggcaaatatcacagcgactggatctctaacgccaacaaagtccgggtgatttactggcaaatgaccggcgataaagccgccgctgccaactggttgcgtcatacggctaaaccagagtttgcgaacaaccacttcctgcaaggtcaatggcgcaacattgcccgtgcacaaatcttgctgggcgagtttgaaccggcagaaattgttctcgaagaactcaatgaaaatgcccggagtctgcggttgatgagcgatctcaaccgtaacctgttgctgcttaatcaactgtactggcaggccggacgtaaaagtgacgcccagcgcgtgttgctggacgcattaaaactggcgaatcgcaccggatttatcagccattttgtcatcgaaggcgaagcgatggcgcaacaactgcgtcagctgattcagcttaatacgctgccggaactggaacagcatcgcgcgcagcgtattctgcgagaaatcaatcaacatcatcggcataaattcgcccatttcgatgagaatttcgttgaacgtctgctaaatcatcctgaagtacctgaactgatccgcaccagcccgctgacgcaacgtgaatggcaggtactggggctgatctactctggttacagcaatgagcaaattgccggagaactggaagtcgcggcaaccaccatcaaaacgcatatccgcaatctgtatcagaaactcggcgtggcccatcgccaggatgcggtacaacacgcccagcaattgctgaagatgatggggtacggcgtgtaagtttagccggataacgcgccagatccggcttacatctctgcatcattcaatgctcacccgcgttacgccatctgtttctatcaaactaaaccgcaccggcaagaaacgctccaccaccgcgatattggtcagcagatggcaactgggatgggcgaccgtaaattcccccgcgcccgccagcgccatcggtagcaccagttggtcagcaagatattcccccaccgccgccgtgcttgccaggtagcgtttcacctctttcaccaactgtgccgcaaccacctcggcactgacgcgcttttcaccgacgacaaaaaagcgttcggtgatattttcactttcgacttcaaggctgacggtattacccggcccctggtcgcgcggcaggttatgaatattctgttcatgcagggaaaaactccccgccagtgtagcgatttcacgctcagcaacatggcgcggcacaccagctaatagaacttctccacgcatctgcacaatgttcccgcgctcgccaagttgcaaggtgttaaagcttgccacggggctgacttccgttgccaccacaccgcctccggcagggtaaaaaccgtggcgtaacagcgtggtttgctgatgaattcctattttcgccagcagcggctccagcacccggcggataaaatccgcaggcggcgcgctcgggttatcggtgccgccgctcacttcaacacggctaggtccatcggcaaaccacagcgcgggcagcaccgtttgcagcaccagcgtacaacttccggcgctaccgatagcaaagcggtaatcgccgccgcgcacggtgccgggccggaagagcagacgctggctccccagctccgcgccttccacggttgctccgcaaatttccgtcgccgcctttaccgcggtcagatgctggcgcaacagccccggtttcgcccgcccggcacgaatgctggtgatggtaaatggctggccggttatcatgctcaggctcagcgcgctgcgcaggatctgcccgccaccttcgccctgtgcgccatccagcgcaatcatccttttcatcatttatccttttacgcacaccacctgacgcagggtatagataacttccaccagatcgctttgtgccgccatcaccgcatcaatatctttatacgccatcgggatttcgtcgatcacttcggcatctttacggcattccacatgcgcggtggcacgaatttgatcttccacgctgaacagttttttcgctttagttcggctcattacccgcccggcaccgtggctgcagctacagaagctctcttcatttcccagcccacggacgataaagctttttgctcccatgctaccgggaataattccatattgaccagcacgcgcagacaccgcgcctttacgcgtcacgtagatctcttcaccaaagtgctgttctttttgcacatagttgtggtgacagttgatctcttccatcgccagcgtttgtggctgtctgaccgttttctgcgtaatgctctgcaatgccgttaccacgttttccatcatcgcatcgcggttaaggctggcaaaaagctgcgcccaggccacggctttcaggtaatcatcaaagtattccgtaccttccataaagtacgccagatcacggctcggcaacgtctcaagcgtttcctgcatctctttttgtgccagatcgataaagtaagtcccgatggcgttaccaattccgcgactaccggagtgcagcataatccacacctggtcgctctcatcaaggcagatttcaataaagtggttaccggttcccagcgttcccaggtgtttatagttattggtattcaggaaacggggatatttttgcgttaaccactgataaccggcttcaagctcagcccatttagcatcgacgttaacaggtggattttcccaggcacctttatcacgtttacaacggccagtggtacgcccgtgcggcacggccgtttcaatcgcctgacgcagctctgccaggttttcaggcaggtcttccgccgttaacgcggtacgcagcgcgttcattccacagccaatatccacgcccaccgccgccggaataatcgcccctttggtcgggatcacgctaccaatggtggaacctttacccaggtgtacatcaggcattaccgcaatatgtttgaaaataaacggcatcttcgccgtattaataagttgctgacgcgcatcggcctctaccggcacgcctttggtccacatttttaccggggcattttcagtggtcagtaattcgtaattcattttgtttttctcttttcgttgtttgctgtcctgataattgcaaccgtcgtgccagaaaattaaataagcagcttaattttttaattcattgttttaaaaaagattatatctttacgtccgtaaccggagatttcccgcaaagccaatttaccgataatgaaatatcgtcttttataaggatatctaagatgcgtaaaacagtggcttttggctttgtcggtaccgtactggattatgccgggcgcggcagtcagcgctggagtaaatggcgtccgacactctgtttatgccagcaagaaagcttggtcatcgatcgactggaattgttgcacgacgcccgcagccgcagcctatttgaaacgcttaaacgcgatatcgccagcgttagcccagaaacagaagtggtgagcgttgagattgaactgcataacccgtgggatttcgaagaggtctacgcctgcctgcatgatttcgcccgtggttacgagtttcagccagaaaaagaagactatttaattcacatcaccaccggtacccacgtcgcgcagatttgctggtttctgctggcagaagcgcgttacctgcccgcccggctgatacaatctagtcctccgcgcaaaaaagaacagccgcgcggcccaggtgaagtaacgattatcgatctcgatttaagccgttataacgccatcgccagccgctttgccgaggaacgccagcaaacgcttgattttcttaagtccggcattgccacgcgtaacccccacttcaaccgcatgattgagcagatcgaaaaagtggcgatcaaatcccgcgcgccgattctgcttaacggtccaaccggcgcgggcaagagttttctggcgcgacgcatcttagagttaaaacaggcgcggcatcagtttagcggcgcgtttgtggaagtgaactgcgccaccctgcgcggcgataccgccatgagcacgctgtttggtcatgtaaaaggcgcgtttaccggggcgcgggaatctcgtgaaggtttattacgcagcgccaacggcggaatgttgtttcttgatgagattggcgaactgggcgcagacgaacaggcaatgctgctgaaagccattgaagagaaaaccttttacccgtttggcagcgatcgccaggtgagcagtgattttcagcttatcgccggaacggtgcgcgatttgcgccagctggttgccgaaggcaaatttcgcgaagatctgtacgcgcggatcaatctctggaccttcaccctgccgggtctacgccagcgccaggaagatattgaaccgaacctggattatgaagtggagcgccacgccagtctcactggcgacagcgtgcgttttaacaccgaagcgcggcgcgcctggttggcttttgcgacctctccccaggcaacatggcgcggtaactttcgcgaactttctgccagcgtcacgcggatggccacctttgccactagcggacgcatcactctggacgtggttgaagatgagataaaccgtctgcgctataactggcaggagagccgcccctccgcgcttacggcgttgctgggcgcagaggcagaaaacatcgatctcttcgaccgtatgcaactggaacacgttatcgctatctgccgccaggcaaagagcctttccgcagccggacgccagctttttgacgttagccgccagggcaaagccagcgtcaatgacgcggatcggctacgcaaatacctggcgcgttttggtctgacgtgggaagccgtgcaggatcagcacagctccagttgaatatggtggtccgtcagcacctgcatcacgcttactggcggcggggcgtcggtgtagacggcatctaccatgctgatgctgcccatattgaccatcgcgttacggccaaatttcgagtgatcgacaaccagcataacgtggcgcgagttctcaataatggcgcgtttggtgcgaacttcgtggtaatcgaactccagcagcgagccgtcgctatcgatgccgcttatccccagaatgccgaaatcaaggcggaactgggagataaaatcgagcgtcgcttcgccaatgatcccgccatcgcggctgcgtaattcgccaccggcgagaatgatgcgaaaatcttcttttaccatcaacgtgttagcaacgttgagattgttggtgacaatgcgcaaattgctgtgattgagcagtgcgtgcgctaccgcttccggcgtggtgccgatatcgataaacagcgtcgagccattggggatttgctccgccactttgcgggcgatgcgctctttttcttcggtctgggtggccttgcgatcgtgccacggcgtgttaaccgaactggaaggcagcgccgcaccgccatgatggccaggatcaggttttgctccgccagctcattgaggtcgcggcgaatagtctgcgggctgacggagaaatgctctaccagctcttcggtactgacataaccctgctgtttaaccagttcgataataccgttgtgacgttgtgtttgtttcatttataaatccctggaattattttcgttttcgcgcattgaggctatcaacaaaagccatcgctaaacccacggctaacccggcgatgtgtgctccgttcgccatgctcatcccaaacaaatcaaaccatccggcgacaatccagatcagcgcaaagataattaacccacgttgcaggtaaatgccactttgcggatcgcgttcgccacgtagccagacgtagcccatcagcgcatacaccacgccagaaagcccgccaaaccacggcccgctgaatttttgctgcacatagccgcttaacagggcgctgataagcgtaatgacaattagcttaccgctaccgaggcgtttttccaccgcaccgccgagataccaccaccagagcaggttaaagaggatatgcatcaggctgaagtgcattaacgcgtgggtgaagtaacgccagaactcaaatttcagtgttggatcgaatggccaggccagccataacatcacttcctgatcgccgagaatttgcatggcaataaacaccaccacgcaggcgatcatcatcacccaggttaccggacctgcgcgttcacgcaaggcggcaaagaaaggataacggcgataatgcaggccactgccggtatggcctgcctgccagctcgccgccagataacgcggatctgccgggttttcgagaaaacgcgccagctccgcccgtacgcgctcggcctgggactcatccgccagccagacatcgctttggttatgttgttgaatcgtgaggataacaccctgcgtcgccatgtaatcaacaaacgcctgcgccacgcgggggttagcaaaagaggtaatcatcaacatcgttgctgtcgcttattccacacaaaaggggacagtataaagcgttacgcgccgtacgccacctctgcgggaaactgacgttgccaggcttcaaagccgccgtcaatgctatagaccacatcgtagccctgttgcagcagatactgcgccgcgcctttgctgctattgccgtgataacacatcaccatcaccggagtgtcaaagtcgttatcacgcataaaagcgcccagcgtgtcgttggttaaatggaaagcctgcaccgcatgtcccattgcgaaactctgtggatcgcgaatatcgaccagcaccgcctctttttcctgcaacttctggtgcgcgtcggcaacgttaatacattcgaactgatccatgcgtctctctttctttacaaacaagtgggcaaatttaccgcacagtttacgtcgaagcggcagataaacgccataatgttatacatatcactctaaaatgttttttcaatgttacctaaagcgcgattctttgctaatatgttcgataacgaacatttatgagctttaacgaaagtgaatgagggcagcatggaaaccaaagatctgattgtgatagggggcggcatcaatggtgctggtatcgcggcagacgccgctggacgcggtttatccgtgctgatgctggaggcgcaggatctcgcttgcgcgacctcttccgccagtagtaaactcattcacggtggcctgcgctaccttgagcactatgaattccgcctggtcagcgaggcgctggctgaacgtgaagtgctgctgaaaatggccccgcatatcgccttcccgatgcgttttcgcctgccacatcgtccgcatctgcgcccggcgtggatgattcgcattggtctgtttatgtacgatcatctgggtaaacgcaccagcttgccgggaagtactggtttgcgttttggcgcaaatagtgtgttaaaaccggaaattaagcgcggattcgaatattctgactgttgggtagacgacgcccgtctggtactcgccaacgcccagatggtggtgcgtaaaggcggcgaagtgcttactcggactcgcgccacctctgctcgccgcgaaaacggcctgtggattgtggaagcggaagatatcgataccggcaaaaaatatagctggcaagcgcgcggcttggttaacgccaccggcccgtgggtgaaacagttcttcgacgacgggatgcatctgcctagcccttatggcattcgcctgatcaaaggcagccatattgtggtgccgcgcgtgcatacccagaagcaagcctacattctgcaaaacgaagataaacgtattgtgttcgtgatcccgtggatggacgagttttccatcatcggcactaccgatgtcgagtacaaaggcgatccgaaagcggtgaagattgaagagagtgaaatcaattacctgctgaatgtgtataacacgcactttaaaaagcagttaagccgtgacgatatcgtctggacctactccggtgtgcgtccgctgtgtgatgatgagtccgacagcccgcaggctattacccgtgattacacccttgatattcatgatgaaaatggcaaagcaccgctgctgagcgtattcggcggtaagctgaccacctaccgaaaactggcggaacatgcgctggaaaaactaacgccgtattatcagggtattggcccggcatggacgaaagagagtgtgctaccgggtggcgccattgaaggcgaccgcgacgattatgccgctcgcctgcgccgccgctatccgttcctgactgaaagcctggcgcgtcattacgctcgcacttacggcagcaacagcgagctgctgctcggcaatgcgggaacggtaagcgatctcggggaagatttcggtcatgagttctacgaagcggagctgaaatacctggtggatcacgaatgggtccgccgcgccgacgacgccctgtggcgtcgcacaaaacaaggcatgtggctaaatgcggatcaacaatctcgtgtgagtcagtggctggtggagtatacgcagcagaggttaagcctggcgagctaaattaacgtaaggtgatcaggtcagatttcaatctggcctgagactgatgacaaacacaaaactgcctgatgcgctacgcttatcaggcctacgtggtttatgcaatatattgaatttgcatggtcttgtaggccagataagacgttcacgtcgcatccggcatgaacaaagcgcactttgtcaaaaatctaacctactttttaattcagggaattaccgcaaagcccacgccatcatacccaacgtaacaaaactcaggcacgttccccactcgcccgctgaaaaatagcattaatgcgcccagcgccagcataaaaattttgagcagaaggtaaattgttggcgtgataaggatattacaaacttcaataataccggcaagtccgacacccagcatggcaataaccaccgccaaaaattgcgccagtatggggatgccgaaaaaagtcattaccaggctggtcaaaatccattttctgttttgcattattctttccattctttttgaatggtgaaattatactccccgagtccccttgccccttctggacacttttccgaaatgatggcggaaaaaaacgggaccctttggccccgttctatttattggtgaacttacaatctcaccggatcgatatgccagatatgatcggcgtactctttgatagtacggtcagaagagaagtagcccatattggcaatgttcagcatcgcttttgcggtccactcttcctgaagctcgtagagttcatcgactttatcctgacaatcgacatagctgcgataatccgccagtacctggtagtgatcgccgaagttgatcaggctatcaaccagatcgcgatagcgacccggatcttccggactgaatacaccgctgccgatttgcgtcagcacctgatgcagctcctcatctttctcgtagtattcacgcggtttgtagccctgacgacgcagttcttccacttcttccgctgtgttaccaaaaataaagatattgtcagcaccgacatgatccagcatctcgacattcgcaccgtccaacgtaccgatagtcagcgcaccgttaagcgcaaacttcatgttactggtgccggaagcttccgtccctgccaggctaatctgttcagacagatctgccgccggaatgatcaactgcgccaggctaacgctgtagttcgggatgaacacgactttcagcttatcgccaatctgcggatcgttgttgatcactttcgctacgtcattgatcaaatgaataatgtgcttcgccatgtaataggcgctagccgccttaccgccaaaaatattcacgcgcggtacccacttcgcatccgggtcggccttgatgcggttatagcgggtaatcacatgcaacacattcatcaattgacgtttgtattcgtgaatacgtttgatttgtacatcgaacaacgcctttggattcaccaccacattcagctgctgggcgatatactctgccagacgctttttgttctccagcttcgcctgatgcacagcgtgattaaccattgggaaatcacagtgttgttgcagctcattaagcaggctaaggtcggtgcgccagttacggcccaggtgttcgtccagcacggcactaaggcttgggttcgctaccgccagccagcgacgcggcgtcacaccgttggtgacgttggtgaaacgacccgggaagattttcgcaaagtcggcaaacaagctttgcaccatcagattagagtgcagttcgcttacaccgttaactttgtggctcacaacaaccgccagccaggccatacgcacacgacgaccgttggattcatcaatgatgctcgcccgtcccagcagatcggtatcgttcggatactgttcctgcaaggttttcaggaaatagtcgttgatttcaaagatgatctgcaggtgacgcggcagaattttacccagcatatcaaccggccaggtttccagcgcctcgctcatcagcgtgtggttagtgtaggagaagacctgacaacacacctcaaacgcgtcgtcccagctaaattggtgctcatcgatcagcagacgcatcatctcaggaatgctcagtaccggatgggtatcattgagatgaatcgcgattttatccgccaggttatcgtaggttttatgcaactgataatggcggcttaaaatgtcctgaatggtgctggaaaccaggaagtattcctgacgcaggcgcagctcacgcccggagtaggtggagtcatccggatacagtacgcgagatacgttctcggagtggtttttatcttccactgccgcgaagtagtcaccctggttgaatttaccgaggttaatttcgctactggcttgcgcactccacaaacgcagcgtgttggtcgcgtcggtgtcgtaaccagggattatctgatcgtaagcgactcccagaatctcttcggtttcaatccagcgcgtttttttaccttcctgctgaatgcgaccgccaaaacggactttatagcgcgtgttgtggcgtttgaattcccacgggttaccgtattccagccagtagtctgggctctctttctggctaccgttaacgatgttctgcttgaacataccgtagtcatagcggatgccgtaaccgcgccccggcaaccctaacgtcgccagagaatcaaggaagcaagccgccagacgtcccaggccaccgttaccgaggcctgggtcattttcttcatcaatcagctcttcgagatttaaccccatcgcttccagtgcgccctgtacatcttcgtaaattcctaggctcaacatggcgttggagagcgtacggccaatcaaaaactccatgctcaggtagtaaacctgacgagtttcttggctcaactgggcacggttactacgtaaccagcgctccacgagacgatcgcgcacagcaaataacgttgcgttcagccattcatgtttattggcgacgaccgggtcctttccaatcgtaaacatcagcttgtaagcgatagagtgcttaagagcttctacgctaagcgtggggctactatatgtaaacggagcattcatataggcgtttcctgaaaattatttcaagcgatagtaaagctcacggtagctcttcgccgcgacctgccagctaaaatccattgccatagcctgacgttgcacaaaccgccacagactaggacgggaccacagtacaaaagcacgtcgaatagcccgtaacaggctccaggcattactatcttcaaagacaaacccactggcgacgccatctgcaaggttctcaagagaacagtcagaaaccgtatcagcaagcccaccggtgcgccgcactaacggcagcgtaccgtacttcaatccataaagttgcgttaagccgcacggttcaaaacggctgggcaccagaatgacgtccgcgccgcccataatgcgatggctaaatgcttcgtgatagccaatctgaacgcccacctgaccggggtattccgctgccgccgcaaggaaaccttcctgcagcaccggatcgcccgcgccgagtagcgccagctgcccgccctgctccagaagacccggtaaggcttccagcaccaggtcgagacctttctggctggtcagacggctcaccactgcaaaaagcggcactttatcgtcaaccttaagccccattgcgatttgtaactggcgcttattttccgctttatcttccaacgtatcgcgggtgtaacggctggccaacagtaagtccgtctctggactccagattttctcgtccacgccgttcagtacgccggaaagacgcccttcacggtgacgctgttgcaacagaccttccataccgtaggcaaactgcggttcggtgatctcgcgagcgtaggttggactgaccgccgtaatgtgatcggcatagtacagaccggccttcaggaaagagatttgtccgttgaattccagcccatgaatattaaagaaactccatggcaattggatgtcattcatgtgatgtgcataaaacatgccttgataggccaggttgtgcacagtaaacacgctcttcgccggacgcccgcgcgccgccagatacgcaggcgcaaggcctgcatgccagtcgtgcgcatgcaccacatcaggacgccagaatgggtcaagcccgctggccatttctgccccaacccaccccagcagcgcaaaacgcaatacgttgtcggtataggcaaataagttggtatcgtgatacgggcttcccggacgatcatagagatgcggcgcgtcaatcaggtaaatgccaaccccgttgtaatgaccgaacaacagcgtgatatgtccggcgaaggtatcacgacgggatactacctgcgcatcggtcacgccacggcgaatatcgggaaatgcaggcaacagtacgcgagcgtcaacgccgtctgcgatttgtgctgcgggtaatgccccaataacatcagccagaccgccggttttaagcagcgggaacatctcactacatacatgtaaaacctgcattatcgctcctgtttatgccctaacttccgtagcatttcgcgcgttaccagcacgatgccttcttcactacgatagaaacgacgtgcatcttcctctgcgttttcaccaatcaccatgccttccggaataacacaagcacgatcgatgacgcagcggcgcagacggcagctgcgacctacccatacttccggtaacaatacggcggaatcaatgttgcagaaactattcacgcgaacgcggctgaacagaacggactgcaccaccacgctaccggagatcacacaaccgccggaaaccagactgttaagggtcatcccgtggctaccggagcgatcctgcacgaatttcgctggcggtaaactttcattgtaggtgcgaattggccaattgcgatcgtacatatccagttccggcaccacagaggccagatcgaggttcgctttccagtaagcttccagcgtacccacatcgcgccagtacggctcggcatccgggtcggattgtacgcaagagagcgggaacgggtgcgcataggccagaccggcttcggtgatcttgggaatcaaatctttgccaaagtcgtggctggagttctcatcgcgatcgtcttcttccagcagttcatacagatagtcggcgtcaaagacgtagatacccatactcgccagagatttgctcggatcgttcggcatactcggcgggttagcaggtttttcaacgaattcgataattttatcgttctcatcaaccgccataacgccaaatgcggaggcttcttcaatcggtactggcatacaagcaacggtgcaacgtgcgcctttttcgacgtgatcgataagcatacggctgtagtcttgcttgtagatatggtcgcccgccaggatcaccacgtattccgctttataacggcggataatgtcgaggttttgggtgaccgcatctgcggtgccgcgataccagttttcccctttcattctctgctgtgctggcagcagatcgacaaactcgttcatttcttcattgaagaaactccagccgcgctgaatgtgctgcaccagagtgtgggactggtactgggtgatcacgcccatacgacggatcccggagttgatgcagttagacagcgcaaagtcgataatgcggaacttaccgccgaagtgtacggccggttttgctcgcttattggttaaatccttcaggcgggtaccacgtcctcccgccagtatcagggcaacagatttcaatggcagctggcgcgccaacattaagtgatcgttcttctctaaactaaccatgactaactccttttttatcatctctggaacacacacaatccgtgtgcaggtccctgccagacagccgtaatcactgggttatcctctccagcgaatgggggaatggcgtgccactccccagcaggtaaaacaatctctgttacctcaagcgtggcgttaattgcgatcaaaaagcgatcgctgagcagaatttgcagctgtttcggcccgttttgccactcatccgtgcttaaaggttgagcatatcgatttagccaacggacattgccgtcgccttcttcccaccagcgattctccaccaaagcgggaatgcgcttgcgcagatggattaacgcggcggtaaatgcggttaaaccactgcttgcctggctccagtccaaccaggttaattggttatcctgacagtaggcattgttattgccatgctggctgtgaccatgttcgtcaccggccagtaacatcggcgtaccctgggagagcaacaacgttgttaacagggcgtgaatgctgtcgcgccgccgttcaaccaggtcaagagaaccgcctaacccttctttaccatgattgttactgtaattgttgttggtcccgtcgcgattttcttctccgtttgcttcattgtgtttatggttgaagcaaacgcagtcgcgaagcgtaaaaccgtcatgcgcggtgacgagattaatcgcggcactcggcagacgaccattacgtttaaaaacatcgctggaggcagcaaaacgcccggcaaacgcccccagaggcaaatcataatgtagccagaaacgacgggcagcatcgcggaaatgatcgttccactcggcaaacagcggcgggaaatttcccacctgataaccaccaggagcgatatcccacggttcagcaattaacttcacctggctgagcaccgggcagttctggatagcggtaaacaacggcgcatcctgacggaactctggcgtacggcccatgactgccgccagatcaaagcggaaaccatcgacgtggcaggtttctacccaataacgcaggcaggcgctggcataatccaccaccgccggatgactcaaattgagcgtgttgccgcaaccggtccagttgtgataatcgccgtcttctcttatccaataatagctacggttatcgatcccacgcaggctgaataacgggccgtcgaggtccagttccgcactatggttgagcacgatatcaagaatgacttcgatacccgctttatgcagtgctttgattgcatcgcgaaactcatccagcgccgtttctgggctgcaggcatacgccggatgcagcgcaaacatcgccaccgggttgtaaccccagtagttacttagccccatgcgttgcagacgtggttcactggcaaactgcgccactggcagcagttccagcgcggtaatgcccaattgtttcaaatagttgatcatcaccggatgcccgagggctttataagtgccacggatctcgaccgggatctccgggtgcaagtacgttaatcctttgacatgggcttcataaatgatggtgctgccccacggcgtgcgcggcggggcatcatcttcccagtcatagtgatcaaccaccactacgcatttcggcgcaatggcggcgttgtcgcgatagtcaggttcattatgaccggcgtgcagcagcgggttatctttaaactccccgtcaatttgccgcgcgcaaggatcaatcaacaacttcgccgggttaaagcgatgcccctcggcgggttgccaggggccatgaacgcgataaccataacgcaaacccgggcgcgcatccggcagataaccgtgccaaatgtcgccactgtgccctggcaagtcatagcgatgttcctggccattggcgtcaaagacacacagttctacccgctcggcatgagcggagaaaagtgtgaagttgacgccctgaccgtcgtaatgcgcgccgaggggagcgggtttgccaatggcgagttgtgtcattctgcctcccgaaccagccagatagtggccagcggtggtagcgtcaggcttagactatgctgacgaccgtggctggcaatctcatcgctgtgtaccgtgccgccattgcctgcattactgccgtgatagtgcatggaatcggtattgaggatttcacgccatttgcccggctggtttatgccgaagcgataatcatgacgcggtaccggcgtaaagttactggcaacgatgatttcgttaccctctttatcgcgacgcacaaagatcagcacgctgcgttctttgtcatccaccaccagccattcaaagccgtacgggtcaaaatccagttcatgcattgctttatggtggcggtaggtgaggttcagatcgcgcaccagacgctggacaccgtggtgccagttatcgccgccttccaacagatgccagtcgaggctggcgtcatggttccactcgcggccctgggcaaattcgttacccatgaacagtagtttcttgcccgggaatgcccacatccagccatagtaggcgcgcaggttcgcgaatttctgccatgcgtcgcccggcatgcggtcgagaatgctttttttaccgtggaccacttcatcatggctcaacggcaggacgaagttttcagtgtagttgtagagaatcccgaaggtcagtttatcgtgatgatactgacgataaaccgggtcgagcttcatgtagtccagggtgtcatgcatccagccgaggttccacttgtaccagaagcccagaccgcccatatcctgcggacgagaaacgccagggaaatcggtagactcctcagccattgtcaccgcaccggaaacctgctcaccaagaatacggttggtattacgcaagaattcaatcgcttcaagattctcgcgcccgccaaattcgttcgggatccactccccctctttacggctgtagtcgcgataaatcatactcgccaccgcatcgacgcgcagcgcatcaataccaaaacgttcaatccagtaaagcgcgttaccgacgaggaagttactgacttcacggcgaccatagttgtagatcagcgtgttccagtcctgatgatagccttcacgcggatcgctgtgttcatacaagttcgtgccatcaaattcggcaagcgcaaagtcatcagtcgggaagtggcctggcacccagtcgagaatcacgttcagaccagctgcgtgtgcggcatcaatgaaataacggaagtcgtcgcgagtaccaaaacggcgggttggcgcatacaggccggttggctgataaccccaactgccatcgaagggatgctcgttaatgggcagtagttcgaggtgggtaaagcccatccatttagcataaggcaccagttgatcggccagctcgcggtagctcaaccagaaattgttgtcggtgtggcgacgccaggaacccaggtgaacttcataaatagagattggcgcatcaaactgattcgcttttttgcgctcttcagtctgtacaaccttttccggcagcccgcaaataagagacgcggtttccgggcgcatttgcgcttcaaaggcataagggtcggacttcagacgcaagttgccattggcatcaatcatctcgtatttatagagctgaccgttatgcgccccagggataaacagttcccagatgccgctctctttacgcaggcgcatcgggtgacggcgaccgtcccagtagttgaattgcccaaccacgctgacccgacgggcgtttggagcccagacagagaaacgcgtacctgtgacgccatccatagtatctgcatgcgcgcctaaggtttcatacgggcgcaggtgagtaccttcagataatagccaggcatccatttcctggattagcggaccaaaacggtaaggatcatcaatcaggttttgctgaccatgccagacaacagccaactgatagcggaaaaaattcttacgtcgcggaatgacgccgctaaagaatccccgactgtcgagacactccagttttgcgagtttgcgcccggttttcggttcaatcacccacacatcggtagcgtcgggtaaaagggcacggacttccagtcccgcggtggttttatgcattcccagtacggaaaaaggatccgcaaaatggcctgcaattagcgcgttaatcacgtctctatcgatacgatcggacatgcttgtcttcctgttttattgtgtcaccccatccaattggatttttgacttctggttgtgacatttttttgacctgaacggcgcagcactctgtgcatcctctctgcgtcgtcctcacttcaggtaaggctgtgaatactcatgtattcagccacccttaaagaatagccaatgctctatttaactcccggtaaatcatgaaacatctgcgcttactcctgtattacgcactaacaggggcggcatcgcgccccagatttaatgaataaagattacgccagttgacgaagcatccgacgcagcggctccgcggccccccacagcagctggtcgcccacggtaaaggcactcaggaactctggtcccatattcagcttacgcaggcggcctaccggcgtggtcagcgtgccggtaacggcagctggggttagctcacgcatagtgatttcccgatcgttcggaacgactttcgcccacggattgtgcgcagccagcagttcttccacggtcggaatagacacatcttttttcaatttaatagtgaatgcctggctgtggcagcgcaatgccccgacacgcacacataaaccatctaccggaattacggaagatgtgttgaggatcttgttggtttccgcctgccctttccactcttcgcggctctgaccgttatcgagctgtttgtcgatccacggaatcaggctacccgccagcggcacgccaaagttatccaccggcagctcaccgctacgggttaaggttgtgactttgcgttcgatatcgagaatagcagaggacggggtcgcgagttcatctgccacatggccatacagatggcccatctgggttaataactcacgcatatgtcgcgcaccaccgccggaagcggcctggtaggttgcaacggacacccaatcaacaagatcattggcgaataaaccacccaagctcatcaacatcaggcttacggtacagttaccgccaacaaaagtcctgatgccattatttaatccgtcggtaatgacgtcctgattgacggggtcaagaatgatgatggcgtcatctttcatgcgcagagagcttgctgcgtcaatccagtaaccttgccatccgctttcacgaagctttggatagatttcgttggtataatcgccgccctgacaggtcacaatgatatcgagggcctttagcgcctccagatcaaaggcatcctgaagtgtgccagtggttccgccaaaagacggcgcagcctggccaagctgagaagtagaaaagaagacagggcgaatggcgtcgaagtcgcgctcttcaaccatgcgttgcatgagaacggagccgaccataccgcgccagccgataaaaccaacatttttcataagcgtttttttcctgcaaagatgtgtgctgtataaatgtgccggtctcctcttggcacatctttcaccatacaaaaagcagccaaagtcgcaagtgaaattaatcaatgatagcgaagccatcagtaatgcgacttatcctgctttgttagcacgcagaaagtccgcggcaattatcagggaatttgagttatgaatgaaatcatttctgcagcagttttattgatcctgattatggatccgctcggaaacctacctattttcatgtccgtactgaaacatactgaaccgaaaagacggcgggcaatcatggtgcgagagttgcttattgctctcctggtgatgctggtgttcctgtttgcgggtgagaaaattctggcatttcttagcctacgagcagaaaccgtctccatttctggcggcatcattctgtttctgatcgccattaaaatgattttccccagcgctagtggaaatagcagcgggcttccggcaggtgaagagccatttatcgtgccgttggcaattccgttagtcgccgggccgactattctcgccacgctgatgttgttgtctcatcagtacccgaatcagatggggcatctggtgattgctctgctgctggcctggggcggcacctttgtcatcctgctacagtctagcctatttttacgtctgctgggcgagaaaggggtgaacgcacttgaacgcctgatgggattgattctggtgatgatggcaacccagatgttcctcgacggcattcgaatgtggatgaaggggtaacgaggagagtttttcgaaaagaacccggtagcgtcacaactaccgggcgaacaaacttaactcaacagctggaacgcaatcatcccaacgatggcaccgacagtgccgaggatggtttccatcatggtccaggttttcagcgtttcggcttcggtcgcgccggtaaatttaccgaacaaccagaaaccggcgtcgttaacgtggctgacaacaatgctaccaccagcgatacaaatgctcagcgccgccatttgcgcaccggagtagttcagttgttcaataaccggcatcaccagtcctaccgccgttaaacaggctacggtggcagaaccctgaatgatgcgcactgcagctgccagcacgaagcaggtgatagcaatcggcaggcccatgccggttaacgcttcgcccagtgccggacctacgccagagtcaaccagcacctgtttgaacacgccgcccgcaccaatcaccagcagaatgatccccgccggttgcagcgcgtgaccgcaaatctccatcactttgtcttttggcatgccctgacgcattgccagaccgtaaatcgccaccagacaagcaaccagaatcgcggtaaacggatgaccgataaactcaaaccattcgtaagcagtacttccttccggcacaaaacgcgcggcaatggttttcagccctaccagcaccagcggcagcaggatcaggctcaggctgaatccgaaagatggcattttgccttcgccgagatgcggttcgctgatgtcgtcaggaatatgcagctcaacgtaacggctgatgaagttaccccacagcggcccggcaataatcattcccggaattgccgcacacaggccaatcaggatcatccagccaaagtcggcattcatctggcttgccagcagcatcggcgctggtccaggcaccagaaatgccgccgctgccgccacgcctgcaaataatgggattaccagcttcaccaggttcgtaccggtgtggcgcgccatactgaaagcaacgctaatcagcagaactatcgccacttcaaagaacagcggtagcgcacagaccagccccgcaaggccgatggcataatgcgcgcggctgtgaccgaaggatttgagcattttgacggcaatctgatcgactgcgccggtttcatgtaagatcttgccaaacatagctcccagggcgacaaccaccgccaggaagccgagggtgcctcccatccctttttccatcgtcgctgcgattttatcgagcggcataccagaaaaaaggccagcccccatggacaccaccattaaagccaggaaagcgtgcatacgcgccttcatgactaaaaacagcagcagtaaaacagaccctactgctgttaaaacaagcgttaatgtagtcactacttatttgccttttttaataacctcaatggtgcttgccacaacaccttccagcggttgatcgatatccaccaccagtacatcggtttcgtccgcacccggctcctgcagcgtttcaaactgcgtcaccaacatttgggttttaaagaaatggcctttgcgcgctttcaggcggatttcaatcacatcaaaatcgcctttcaaatagatgaaagagagattcggattaccttcacgcagcaagtcgcgatagtgttttttcaatgcagaacagacgatcaggctcactttattagtgcgctgcatagcaaacgcggcgtcgttcagcgcctgcaaccacggtttgcgatcgtcgtcattcagtggttcgccagacgccattttttcgatattgcgccgtggatggaggaaatcgccatcaagaaacgcggcatgaagttgatgcgccacttcactggcgaccgcagatttgccgctgccgcttacgcccatcaagacgtaaatgtggtgatcatggttagtcgtgctcaaagtggtgcccccacaatacaagaattaaaaatgttacgggtaactgttatcggtaacattgtccagccggacaatatcagaagcaatatccatccatgccttaagtgtataagtgtgagctacttcaaatttgtgggcttaaatagatccgcccggactcaaggtgaaacctaaatctaacattttcggtgtcacagattcgccacgaatacgcgccagcaggcgttcagcgccaatactgcccatccgctcacgcggcgtcagcacgctcgcaagtcgtggctccatcacctgaccaatgtcatgaccgtggaaaccggcaatcgccatatcgtcaggaacttttaaccccagacgctgacattcaaacgccgcgccgaccgccaggtcatcattcgtacagaacacgccatccagctgcggatattcccgccgcgcctggcgaatcagttcaataccggaagagtaagaagaagattgctcaaccatcacgctatatggcaccaggcctgcatccagcatcgcctgttcgtatcccttctgtttgatgatagtacgttcgtcgagacgtgcgccgagataggcaatgtggcgatgcccgcgagcaataatggcagtggtcatctggcgtgctgcttcaaagttatcaaaaccgacggcgatatcaaggcatgggctcttgctgtccatcagttccaccacgggaatacccgccacttcaatcatctttaaggtgcgcggcgtgtgggtacgttcggtgaggatcaggccgtcgatattccaggagagcatggattcgaggcgttcttgctccatttccggtttataaccgtagtgcgccagcatggtctgataaccgtgcgcgtcggtgacgctttcgattccgcgtaatacttccgcgaaaacctggttggtgagagaaggtaacaggacgccaatcgcccggctggtggcgttagagaggatatcgggcgcacgattgggaatatagcccagttcatcaagagccgcggcaatcttgccgcgtagagcgacggaaacctgctccgggttgcgtaaaaaacggctgaccgtcattttggtcacgcctacacggtcagccacatcctgaagtacgggtcttttctttttcatcgtcctgaaggtacaaaagagatagattctcttagtttaacacggacacatcagaaccttcccggggaaaacagtgcttgtttacaattattagatatacactaaatcaattgcatcgcattgtgctaacgacgcggcaaaaccccggaagcgtacatcagcacgcgaccggagcgagcgaggaagcctgcaaaaaggcaggcttcaaagatgccgttgagttttaaaccggcggcagatcgaacagtaacacttcgctgtcgctatccgcatggatggagattgcctgctcatcccagattgccagaccatcgctggtgctggctttcacgccgttaatggtgacattgcctttcaccacctggatccagacgcggcgttcagcggcaatctgatgcacgctctgctcatctttcagcaacgcccagcggtacagttccatatcctgatgcactttcaaactaccatctcgcgcatccgggctgagcaccagctgtttgccctgtacggcatcgaagcgacgctgttcataacgcggcgtaataccgttttcttcaggcatgatccagatctgatacagatgcagacgctcggtgctgcttgggttgtactcactgtgacgaatacccgtaccagcactcataatctggaactcacccgccggaacctgctctttattgcccatgctgtcctgatgctcaacagtaccttccagcacgtaggtcaaaatttccatatctttatgcgggtgagtgccgaagccctgccctgcttcaatcacgtcgtcgttaatcacgcgcagcgcggagaagcccataaagttcggatcgtaatagttggcaaaagagaaagtatgccaggagtccagccagccatgatttgcatgaccacgttcatttgctttgcgtaagtagatcatttgtattcgccccctgaatgatttcgatgggcttagtgtggacccgatctgcctgggatgatagagggtgaaaattgacccctctgttcaaaaaaattgaactattcgaggggccatcaaacttacttagcgagagttactgtggagggagaggcttgctcaaatccgcgttcaaggatttccagattggtaagaacttcagattccttgacgtaatttggcgcaccgtgggtgatggtttgatacaacgcatcataaacgcgcccgtaatcgcccatctccggcttcatctcttctctgaccgtcacgccctcgtcattgacatactccagcacaccgacgctatcatccgctgcgaatcccggttcgcccggcataatattagccttcaggctggtttcctgctggtcgataccgtatttaataaagctacctttcttaccgtgaacgataaatttcggataatcgattttcaccagatggctggttttgacgatggctttcaggtcgccataaaacagttgcgcttcaaaggtgtcgtcaggattggctttattacgcaggctgcggatgtcataagcgacgtgatccgggcgaccgaacagagaaataatctggtccatcgtatgcacaccaaggccataaaacgcgccatcctgcggcagcccaggtttggtttctgccaccgggcggtaatagtcaaaatggctttccacttcaacaatctctcccaacttgccactttcaatcgcttttttcgctgtcaggaagcaggagtcaaagcgacgattctgatacggcgtgacggtcagccctttgcttttcgccaacgcaaacagctctttcgcctgcgcaagtgtcggagtgaacggtttttcgaccagcacatttttcccggcttccagcgcgcgtttcgcgtactcgaaatggctgtccgcgtgggtgcagacaacaaccagcttaacatcgggatcgtttagtacttcgtcgagatcgctggtgaaatggatatgggaataaatgggagcctgttcttccggcttcgcatggcgacgaaaaatatgcgcgacatgccagctatccttgcggttaagtacatacggcagatggtaacgggtggtgcttttgccgaagccaataaaggcgcagttgatgaccatgatttcgtcctttttaaggtggttatttacaccttagcgcaaagcggacgtggttcctactggagtgcgcataacgaacacaagcactcccgtggataaattgagaacgaaagatcaaaaaaaaagccagcacccggctggctaagtaatactggaagcaatgtgagcaatgtcgtgctttcaggttctccgcgagggtcttcctgatcgcgagacaataataatcattctcattcgcacttgtccaacactttttgcaaaaaaatgcatttgactcgcatttgaaagtcaatgatgttgaaagggacatttaccccaaagaggacaaaggaacaaatgctcttcccacgaagagggccgctaaccttagtaccccgccgttaaatcatccacgctgcgcgggtcggatgcgccgtacaactcaccgtccggcccaaccataatgctttgtgtactgcccatcgcctctttcagcgccactttctgaccttttgcttccagcagcttgagcgtatccgggctaaaccctttttcgacacgcagctcgtccggcaaccactgatggtggaaacgcggcgcattggtcgcttcggcgacgttcaagccataatcgatgctattcaccaccatttgcagcactgtagtgatgatccggctaccgcctgggctaccggtaaccagccaggttttaccgtctttcaccacaatggtcgggctcatgctgctcagcgggcgtttgttcggcccgacggcgttggcatcaccgcccaccagcccgtaaacgttcggtacgcccggtttggcggagaaatcatccatctggttattaagcagaataccgctctcgcccgcgacaatgcccgtaccgaaggtggtgttcagcgtataggtcaccgccaccgcgttaccatctttatccaccacactgtaatgggtagtttgattactctcataaggcgcaagcttgccggggcgaatttcgctggatggcttcgctttattgatatcaatttgatcggcaatagatttggcataggctttattggtcagcgcctgccacggtactttgacaaaatccgggtcgccaagatattcgctgcggtcggcgtaggcgtatttctccgcttctgccatgatttgcatcgcatcggcgctgccaaagccgtatttcttcatatcgaagttttccagaatattgaggatttgtacgatatggatcccgccggaggatggcggtggcatggagtaaacctgatacccgcgataatcgccgcttatcggagtgcgttcgaccgctttataggctgctaaatcttctttagtgatcaagccaccgtttttctgcatctcctgggcgatctgttccgcaatcgtgcctttatagaattcgtccgggccgttttcagcaatcatctccaggctctttgccaggttcgcctgcaccagcgtgtcgccctttttcagcggctcgccctctttccagaagatagctttactgttttcgtgattcggcaacacttcgctaccgtaggttttgagatcgtcagccagcgcgtcgttaacgataaaaccatcgcgtgccagtttaaacgcgggctgcacgactttgttcagcggcatggtgccgtatttatccagcgccaggctgaaacctgctaccgtacccggtgtgccggaagccagatggctagtgagactttttttgctgtccgggttgccctgatcatcgaggaacatatcgcgggtcgctttggcgggtgccatttcgcggaaatcgatagccgtggtattgccatttttgctgcggattaacataaaaccaccaccgcccagattccctgcctgcggatgcgttaccgccagcgcgtagcccaccgccacggcggcatcaacggcattcccgccctccttgagaatatccacccccacctgagtggcagtggcgtccacagacgctaccattccctgtttcgcgcgtaccgggtggaagacatcttcctccacaccatagctgacgggcggcgcaggaggcgcggcggcggcgctaaaacaacttccactgagcagagcagcaatggccacccggcgtaaaaacgtcggttttatcatcgttattctccagagattaaggggcaaccccagctaagcctggtatataactctgaattaatcatcgttttgtcgggaagcgagtaaacttaaaggatatcttcagaggaggatacgcgatgaaacgacttctgattcttacggcactcctgccgtttgtcggctttgcacagcccattaatactctgaacaaccctaaccagccggggtatcagatacccagccagcagcggatgcaaacccagatgcagactcagcaaatccagcaaaaagggatgctgaatcagcaactgaaaacgcaaactcagttgcaacagcagcatttagaaaaccagataaacaataattctcagcgggtgttgcagagtcagccgggggagcgaaatcccgcccggcagcaaatgctgcccaacaccaacggcgggatgttaaacagcaaccgtaatccggatagtagcttgaatcagcagcatatgctgccggagaggagaaacggcgacatgctgaatcagcccagcacgccgcagcctgacattccgttgaaaactattgggccgtaattattgggccgtaaagttcggaccaatcacgtcaatcgcatcggtacagatgcaatccacaccccagcgcagcaactctgctgcgcgctggggtttattgacggtataaaccagaatccgcagtccggcgtctttcaactgcatcactcgcgctttattgagtaacttatgattgagatgaatagagacgcagcccagccgcgcggtcagttcgcgccagtcgtcgcgccactcatccagcaacaaaccgcgcggcagttccggtgccgcctgttgtgcagcttctaaagcatcaatctcaaagctactcagcagcggcggcgtcataccggcccacagctcgcgtgccgccagcgccaccattttgcccgttaatggcccggtgccggtggtgggtttgatttcgatattcgccatcatcccgtgttcgcggcaacgttccgccacctggctaagcaacggtagcggctcacctttaaacattttgctgtaccaactgcccgcatccacgcgcagtaaatcctgccagttcagttcacccgcgacgccccagccgttgctggtacgttcgagattgtcgtcatggagcaggaagatctcgccatctttgcttaacttcgcgtcaaattcgatcatcttatgaccgtattttgccccgacgtcgatactcgccagggtgttttccggggccagcttaccgccgccacgatgagcgacgatgcggggataaggccagttactcatactcgttgtcctgtttcaccatcaaaaagatgcagctgattttccgccagatgcagccacagcgtgctgcctgccgtcgggcgctcctgatgcgccagtcgcaccaccagcttctgctcgccccagcgtccgtgcgccaggttatctgcgccgaggatctccagcgtgtccatcaccatcggtacgccgccttctgcctggctgcttagcgcaatatgttccgggcgaatgccgagagtcattttacgcccggcatactgacggtagccaccgtttagcggcagctcaataccgccgtccagttcgaaatgcgtgccttcgttattcacgcggcctgtcagcaggttcatcgccggactgccgataaaactcgctacaaacaggctggcgggcttttcgtagacttcaactggtgtgccaatctgttcggcaacaccgccgttcatcaccattactcgctgggcgagcgtcatcgcttcaacctgatcgtgagtaacgtagagactagtcgttttcaggcgacggtgcaactgttgcagttcaagacgcatctgcacgcgcagcttggcatcgaggttagagagcggctcatcaaacaggaacaccgccggatcgcgcacaatcgcgcggcccatcgccacacgctggcgctgaccgccggaaagctcgcgcgggcgacgtttgagcagaccgtccagctccagaatgcgcgccgcttctttaacgcgctcggcaatttgctgcttgcccatgccgcgaattttcagcccccacgccatgttttcttcgacactcatatgcggataaagcgcgtagttctggaacaccatcgcaatcccgcgatcttttggctccatttcagtcacgcgctggtcgttgatccagatatcgccttctgtcacccgctccagcccggcaaccatgcgcagcagcgtgcttttcccgcagccagacggcccgaccatcacgataaattcgccatccgccacatcaagggtcagcggtttaatgacctgggttttaccatcccagcttttggttactgcctgtaatttcagtcctgccatcttatttctcactatcgaccaggccgcgcacgaaggcacgctgcatcactaaaacaatcaccaccggagggataagcgttaacaacatcgccaccatcacactgttccattccgtggtgccttcgcctgtagcgatcatccctttgatccctgccacggtggtgccgagatccacatcggtaataatcaacaacggccacaaatactgattccagccgtagataaaggtgatcacaaacagcgccgccagattagttttggagagcggaaaaacgatgtcgcaaaagaagcgcattgggcttgcgccgtcgatccgcgcggcttccaccagctcatccggcagcgtcataaagaactggcggaacaggaaagtagcggtcgcgctggccatcagcggcagcgttaaaccggcgtagctgtcgagcatctgcaggttggcgatgacttccaccgtcgggaagatacgtacttcaaccggcagcatcagggtgataaaaatcatccagaagaagaggttacgtagcggaaaacgaaaccagacaatggcaaatgcgctgagcatgctgacggtaattttgccgagcgtaatgctgaacgccatcacaaagctgttaagcaacatccgccagaacggcgcgctattcgtgcctaccccgttcacccagatgttgtggatgttttccagcagatgtgtgccggggatgagcgtcatcggcgcggcatagacggcctgtttatccagcgtcgccgcgacaaacgccacgtacagcgggaagaggatcaccgcgatcccgaggatcagcatggtatggctgaatatcgtcagccacggacggttctcaatcattggtaacgcaccttgctttcaacatagcggaactgcaccaccgtcagcacgatgacgaggaacatcaacaccacgctctgtgcggcagagctagccagatccagtccggtaaaaccttcgcggtagatcttataaatcagcgtcgtggtggcctgaaccggcccgccggacgtggcggcgtcgatcaccgggaaggtgtcgaagaaggcatacaccaggttcactaccagcaggaagaaactcaccggggcgataagcggcagcgcaatcttaaagaagcggcgaatcggccctgcaccgtcgatggctgcggcttcgatcaagctacggggaatggattgcagcgcggcatagaagaacaggaagttgtagctgatttgcttccatacactggcaaacaccaccagaaacattgcctgaccgctgttttgcgcgtggttccagtcgtagccgaactccgcgagaaaatgggtgatcagcccgcgaccggggttaaacaggaagatccacaatacggcggcaacggcgggagccacggcgtaaggcagcaacattaaggtttgatagaaacggctgccgcgcacgatgtactccaccagcgccgcaaagaacaggcttaccagcaaaccgctgacggtgacaaaggtgctgaattttatcgtcgtccagaaggagtcgagatagtagctgtcatggaacagcgtgacgaagttatccaggccgacaaactggctggagaaaccaaacggatcgacgctttgtaggctgtaccacaacgcttcgcccgcaggccagataaaaaagataacggtgatgatgagctgcggcgcgaccagcagataaggcagccagcggctgcggaacaccggacgggaactactcattacggttaattcctgaactgtgccggatgcgcttcgcttatccggcctacacgcgatgccaggtcagataagcgaaacgcatccgacattacactgattaagacttcgtgcttttctcaaagcggcgcagcaactgatttccacgctcaacggcggtatccagtgcctgctgtggtgtcttcttaccggtccacacgctctccagctcttcatccacaatcacgcggatctgcggcatgttgcccagacgcagccctttggtgaacggcaacggcggcttattcagcatctgacgcgtcgcggtatccgcccctgggtttttctcataaaagccctgctcacgggtcaggtcatacgctgctttggtgattggcagataaccggttttctgatgccactcggcagcgttttctggcttcgcgaggaaatcgaggaacttcgccacaccggtatacgtttctttatctttaccctgcatcacccacaggctggctccgccgataatggcgttttgtggcgcatctttcgcatcggcgtcgtaaggcatcatgcctacgccgtagttaaatttggcgtactcgcgaatgttggcaagagaaccggaagaggcggtggtcatcgcgcaatcaccgttatagaacttctcggtggattcatccttacgaccgacgtagctgaagtcgcccttcttgttcatctcctcgagcatggcgatgtgtttcacctgctccggcttattgaactccagcaccgcgtccgtgccgtcaaagccgttgtttttgctggcaaacggcagaccgttccaggcgctaaagttttccagttggatccagccctgccagccgctggcgtagccgcacttcatgccggaggctttcagtttcgcggcatagtccgccagatcctgccaggttttcggcggctgttccgggtctaatcctgctttcttgaaggcgtctttgttgtaatagagaacgggggtgctgctgttgaatggctgggagagtaagtggcccgttttgctgtcggagtagtaaccactaaccgtcggcacaaactggctctcatcgaactgaatccctgcctctttaaacacgtcatacaccggtttaatggctttgctcgccatcatggtggcggtgccaacttcataaacctgcaaaatagccggcgcgttgccggtacgaaatgcggcaatccccgcgcttaaattctgttcgtagttgcctttataggtcggtacaattttgtaatccgggttttcggcgttaaaacgttgggccagagaatccacctctttacccagttccccttccatagaatgccagaacggaatggtcgtcactgcctgtgcattccccattaacgccagtccgagcgccagtgcactagctgtataatgtaacggtttcatcgtttatctctcttgttgtaccgaatgcgcgaattcacgcgttttatgctcgcggggtaacatgacatgctcgaattacagaaaaataacttttttgttacatttgtaagatagtaaggtgtcagaaagatgacaaggcggtgacggcgtgggtgagggaaaatgggagatggggcacggataagcgggaaaatatagaaggtctgaatcaaactctacagattgctcatcgtttcatgccggatgcggcgtaaacgccttatcaggcctacaagatcgtgcaaattcaacatattgccactcacccagtaggcctgataagcgcagcgcatcaggcaattttacatttgtcacctgtctcaaaggagtcttttgactccctatcaatcaacgtgttattacccgcctaaatacgcacttctcaccgcttcattcgccagcagcgcatcaccagtatcggaaagcactacatggccgttttccagcacgtagccgcgatccgccagctttagcgcctggttggcgttctgctcgacgagaaagatagtcatcccctgctcgcgcagctgctcgatggtgtcgaaaatttgctggatgataatcggcgcaagaccgaggcttggctcatcaagcagtagcaaacgcgggttgctcatcagcgcacgaccaatcgccagcatctgctgttcaccgccggacatggtgcccgcccgctgaatacggcgctcatgcagacgtggaaacagctcatacacccactttatgcgctcctggaactggtcgcgttcagcaaaaaaaccgcccatcgccaggttctcttccaccgtcatccggctgaagacgcgacgcccttccgggacaatcgccaccgcttcgcgcatgattttcgctgtctgccagtcggtaatgtctttatcatcaaacacaattcgcccgctggtggcacgcggatcgccgcataacgtgccgagcaaggtggttttccccgccccgttcgcgccaatcagcgtgacaatctcgccctgattgatatgcaggctcacctcatgcagcgcctggattttgccgtagtgggcgctgactttgtcaaaggacaacatgactttttccatcttatgcctcacctaaataggcacggatcacgtccgggttattacggatctgctccggcgtaccgtttgccagcggcgtcccctgattgaccacgtaaattcggtcgctaattcccatcaccagcttcatatcgtgttcaatcaacaagatagtggtgttgtgatgattgcgcagttcggcaatcagctcatccagctctttcgtctctttcgggttaagacctgccgcaggttcgtcgagcattaaaatctccggctgcgtcaccatgcagcgggcaatctcaagacggcgctggtcaccataggccaggttactcgcctgacggttggcgtgttccagcaaaccaatgcgctcaagccaggtcgcggcgcggtcgagcgcttcgctctgggcgcgacggaaggatggcgttttcaacaggccagagaacagcccggttttcagttgctgatgctgcgccaccagcaggttttcaattaccgtcatttcacggaacagacgcacatgctggaaggtgcgcaccacgcccatgcgggcaatttgctgccccggtaaaccttccaggtgctgatcgcgcagtaaaatggtgccgccggtgggtttgtagaatccggtcagacagttaaaaaccgtggtttttccggcaccgttagggccgattaagctgacgatctcctgcgggtacagttcaagattgacgttgttcaccgccagcaggccgccgaagcgcatcatcaggccgttaacagataataatggctgactcatgcctgctctcctttcgctgcgccgtttttcagcttcagttgcgggcgcgtcatgggcagcaagccctgcggacgccagatcatcatcagcaccatcaaaccaccgagcattaacatgctgtattcgttgaaatcacgcatcaactcgcggctcaccaccagcaaaattgccgccagaatcaccgcaaattggctgcccataccgccgagcaccactatcgccagcacaaacgcgctttcggcaaaggtgaaggattccgggctgacaaagccctgacgcgccgcaaacagcgttccggcaaaaccggcaaacgcggcacttatggtaaaggcagtcagcttgatacgacgcgggcttaagcccaggctacggcaggcgatttcatcttcacgcaacgcttcccacgcacgccccagcggcatccgcagcaggcggttaatgacaaacaggcttagcaccaccagcagcaacgccaccaggtagaggaagatgacacgatcggagggatcgtatttcaggccaaagaaattactgaacgtgtcccagccgccttcacgagcggtacggctgaactcgagtccgaagagtgtcggtttcgggatctgactgattccgttcgggccgccggtaatttcggtgttattgagcagcaatatgcgcacaatttcgccgaaaccgagggtaacgatcgccagatagtcaccgcgcaaacgcagcaccggaaaaccgagcaggaagcccgccgccgctgccattaatccagcaatcggcaggcaggtccagaagcccaagccgtaatagtgattgagcagcgcaaaagtgtaagcgccgatggcgtaaaaaccgccgtaccccagcaccagcagaccagaaagaccaacaaccacgttcagcccgagaccgaggataatgtagatcatggtcagggtggcaatatccaccgtcccgcgactaaccataaacggccacgccaccgcaagcaccaacagcgccacgaggaacagtttctgcttcaccgtggagccatcaatggcgggcagaataaacttcggtccggaaacgcttttcaaccctttctggaaagccggtcgcaaaagctggaagaaaaagaccaccgccgtgccgataaacacccactgccaacggacatcgctagccgtgtcgaccaccagtttggtgccatccagctccagttgcacgcccataaagacgcccgccagcacaaagaacatcgcggcagagagcagcgccattgcaatatgcatcggtttcatactttctctacctccgggcgacccagaataccggtcggcatcaccagcagcaccagaatcagcagggcgaaactgaccacatctttatattccgtactcagataggcagaagagagcgcctccgcaatccccagaatcaggccgccaatcatcgctcccggaatgctgccaatcccaccgagcaccgccgcggtaaaggctttcatcccggccataaagccgatgtaggggttaatgacgccgtagaactgaccgagcagcacacccgccaccgccgccatcgccgcgccaatcacaaaggtcagcgcaatcacccggtcggtgttaatgccaagcagactcgccattttcagatcttccgcgcaggcacgacacgcgcgacccatgcgggaatagcgaatgaaaatcgtcagcgccagcatggcgaggaaggtaacaatccagatcaccgcctgcatggtggtaatagaggcagagaagttttcgctatgccccaccacccactgaccgttaaacaggctcggcagcgccacgtcgcggctaccttcggtcaggctgacgtagttttgcaggaagatggacataccgattgcagagatgagtgcaatcaggcgcttagagttacgcaccgggcggtaagccacccgttcgatactccagccgtaggcgctggcaatgacgattgcgccgacgaatcccgcagctaccagcagccagccggtatcaatgcccatcatcatcagcgcggcgatgatcataaaactgacgtagctgccaatcatataaacctcgccgtgggcgaagttgatcatgccgataatgccgtaaaccatggtgtagccgatggctatcagcgcgtaggtactgcccagcgtgacgccgttaaacatctgctgcaagaaatacaaaaactgctcagacataaggtaacctttctaaacccgcccgcattttacgggcggtgggatgatcacttggctgccgtggaactaccgtcggcgtgccactggaagacaccaaaatcaaatcccttaagatcgcctttttcatcccagttcagcggcccaatcacggtgtttgcaccgttagcttttaaatctttcaccagcgccagcggctcatcgctgccggtacgctcaagggcagtcgccagagattgcaccgccgcgtaggtgatccagacataaggcccggacggatctttcttgtctgctttcagcgcatcaacgatgccctggtttgccggatcctggtcatagcgttttggcatagtgaccaacatgccttcggcggcatcaccggcaatgttgctcaagctcgcattacccacaccttccggccccataaactgggttttcaggccaacggaacgggcctggcgcagcatctgccccatttccgggtagtaaccgccgtagtaaacgaagtcgatgttttcttttttcaggcgggcgatcagcgcggagaaatctttctccccggcggtaataccgtcgaagaagacgacgttggcgttagccgctttcagcccgtcctgcacgctacgcgccagcccttcgccatactgttgtttgtcgtgaatgatggcgatgcgctggggcttcaccgtctcaagaatgtattttgccgccgttggcccctgggaagagtccagcccggcagtacgcataatgtgttgataaccgcgttgggtcagctccgggttggtcgctcccgggctgatcatcagaataccttcgtcttcatagatatcactcgcaggctgggtagaagaagaacacagatgaccaataacgtatttaatgccgtcattaacgattttgttggcgaccgcaacggcttgtttcgggtcgcatgcgtcgtcatattccacgccaaccagtttatcgcccttaattccccctttggcattaatgtctttaattgcctgacgcgcgccgttaaattccatatcgccccactgggcaatcgggccggacatcgcgccgacaacggcgactttaatatcgtcagccatagcggtgtgactaattgccagtgcaatcatccctgcgatgatagttttcgcattccgtttcatagtcaaaaatccccattcgtgatgttgtgttgctttgtttttatgtgttaacaaatcagactgttctttttttatactgcactgtttttgcctgtctgattaaggggttagcgcagtattttgtgataatagcgattaaaatccctatttttcagtcgattaagaacagataatattctgaatttattgatagataaacagaaaaaagtgcctttgtcagcataaaataacggcacaaagggcggaataattcactatcattcaggggattatgctggacatttttcattctctaatgttttaattttgtaattattgctgttaaaaaattaatcacctgccaaaagaaataaaaaagagaaagcctccgattaaattatttcgctacactggttccacttttgtgatttacacgggttacccatgaagctgaccatcattcgattagaaaaatttagcgaccaagaccggattgacctgcaaaagatctggccggagtattccccttccagcttacaggttgacgataaccaccgtatctacgccgcgcgttttaacgagcgcctgctcgctgccgtgcgggtaaccttaagcggcaccgagggagcactggattccctgcgcgtgcgggaagtcacccgccgtcgcggtgtggggcaatatctgctggaagaggttttgcgtaacaatcctggcgttagttgctggtggatggcggatgcaggcgtggaagatcgcggtgtgatgacggcgtttatgcaggcgctggggtttacggcacaacagggcggctgggagaagtgttaatcgtcaagtttgatttcaaaagtgatattgcctgatgcgctacgcttatcaggcctacaatgtgtgttgcaatttactgatttctttggatcttgtaggccggataaggcgtttacgccgcatccggcatgaagcaacgtactcgatattagcaatttggcggcaacccaaagttgccgattaatgattacttcgcatcggtcgccgtgccgttggcgtgccagtcaaatacgccgaactcaaagcctttcagatcgcctttctcatcccaggtcagcggtcccattacggtatccacggagttcgctttcaggtatttggcgatttcagccggatcgtcagactgattcaggcccgcctgcaaagattgcagcgcggcgtaggtggtccaaacgaatgcgccacttgggtcctgttttttcgctttgatcgcgtcaacaatgggtttgttcgccggaacctgatcgtagttcttcggcttggtcaccagcagcccttccgcactttcgcccgcaatgttagacaggctaacgttagccacaccttccggccccataaactgagttttcagccctgccgcgcgtgcctgacgcaggatttgccccatttccgggtgataaccgccgtagtaaacgaagtcgatattctcttttttcagacgcgccaccagcgtactgaaatctttttccccggcggtgatgccatcaaagaacaccacgtttgcattgcctttcttcaggccgtcctgcaccgctcgcgccagaccttcgccgtattgctgtttgtcgtgaacgatagcaatacgctgcggtttcactttctcaagaatatatttcgccgccgtcggcccctggtcggagtccaggccggtggtgcgcaggatcagctgatagccacgggcggtcagctccggcgcggttgccgctggggtgatcattaaaatgccttcgtcttcgtagatgtcagacgcaggctgcgtactactagaacagaggtgaccaatcacatatttaatgccgtcgttaacgactttgttcgccaccgcaaccgcctgtttcgggtcacaggcatcgtcatattttacgatttgcagtttgttgcctttaatgccgcctttagcgttgatatccgcaaccgcctgctctgcgccggtaaactcctggtcaccgtactgcgcaaccggaccggacattgcgcccacgaccgcgactttaatatcttctgccagagccatattgctgaatgccagcgcgatacatcctgccagtaacgctttaccctttatgttcatcctgagaatccccattcttctggttattacgtgtgttgtgatgttgtttttcagcactttatttcgttttatgcatgactacccgtgctttagcagcatactctgctaaaacatacccgatttttatgatattggaatagctattttgacagtttattaacaatctgcgtggggattggcgttttgccggaggggaaattgattattacagaggcccaaaaaacaaaaaccccggactctcatccagggttctctgcttaatagcggaaattacgcttcaatggcagcacgcaattttttcatcgcgttcttttccagctggcgtacacgctcagcggaaacgccgtaacggtcagccagttcctgcaacgtggacttgttgtcttcgtccagccagcgcgcacggatgatgtcctggctgcgttcgtccagaccctgcatcgcgtcggtcagacggtttgccgcctgctcttcccagttatcatcttcaatgccgtcggcaaagttagaacttttatcctgcagatagagcaccggagccatcggctggctgtcggaatcgtcgtcggaagacaggtcaaaggtcatgtcctgtgccgccatacgactttccatctcacgtacgtctttgctggttacgcccagttcacgggccaccatttcgacttcatcctggttaaaccagcccagacgctgcttggttttacgcaggttgaagaacagtttgcgctgcgctttggtggtcgcaactttgacgatacgccagttacgcagaacgtattcgtggatctctgctttgatccagtgaacggcgaaggagaccaggcgcacacccacttccgggttgaaacggcgcactgctttcatcaggccgatgttaccttcctgaatcaaatccgcctgtggcaggccatagcccgcataattacgagcaatatgaacaacaaaccgcaggtgagacaggatcagcgttttagctgcttccagatcgccatggtaatgcagcttttcagccagcgcccgctcctcgtcagcgctcaacatcggccacgcgttagctgcccggatgtaggaatccaggttgccaactggggctaaagctaaactttgcattttgtcagtcattcaaatcctctcaatcgatatcttctggcgcttcagtggtagcaacaactgtgccagagcttaagagcaacgaggttatcattcactgttttatcagaccgtgattttatccacaagttcaatgcaagcttgtgaataaattacgcacaaaatgtgacatagagatgaaataccgggaagagacaacggggtctctttccctgctacggaacccattgcagggaaagagtataacacgcttttattattcaggcgtaaagtggcgtaaatgttgtaccgtggcaagccacgctgccacccagccaatcatgctgcataccagcagcaatagcaggcattcatcgaaacttaagccattgatatcaaacttcgttccgaaaacctgtgccacttccgcaaccgcgctactcaatcgcagcaccagaatttcactcaaaattaaactcaacaatgcgccagaaaatcccagcagtgcgccaccatacaggaacgggcgcaggatgaatccatctgtcgcaccaatcagtttctgtacgttaatggagtcacggcgagcaaagatactcagacgcacactgttaccgatgacgaggaacacggccgccaccatcaacacgccgatcatcgcgctaacgcgcccgaccagcccggtcaacgccgccagacgggcaaaccagctgtcatccatccgcacttcgtcaatgccgttaatctgcgtgatacgatcacgcagcgtattcagactttccgtcccctggaaatcgagtttcgggatcaccaccgccactgccggaagcgggttttcttccagcatatccagcgcaccaccaaaaccagaccagttacggaactcacccagtgcgtcttcacgagaaagatagttcactttctccacgccttgctcggcctgcaactgtgccaccacgcccgcagcagcgtcatcgtccagcgttttttgcagataaacagtgatttgcggactcggataatactgcgtcgccgcctggttaacgtttttgtacaccatataacagacgctgggcagcgtcagagaaatggcgataaccatcaccgttaaaaacgtggcgaacggtttgcttttcagatcctgcaatgcgccgtggaaggcatagcgcacctgttcgttgaaaacgttggttttgcgatttaccggttttgggctggatttcgcgcgttttggtgcgttacgaccgccgtcgccactgccgccgacgcttttacggaagcgatcaagacgcccgccaaactgccgaatatgattgattgcatcgcgcttattcatggcccacgcctccatgcaagtgaccatcgctcagggtgagcatgcgataggaacgccggctgatcaggttgatgtcgtgcgttgccatcaatacggttaccccaacgcggttaaactcttcaaacagacgtaaaatgccttcgctcagcgcgtcgtccaggttaccagtcggttcgtccgccagcagtaccgcgggcttgttcaccaccgcgcgggcaatgccaacacgctgttgttcaccgccgctaagctgaatagggaagttcttcgctttgtccagtagcccgactttatccagcgccgcgctcacccggcgacgaatatcgtcaccgctggcaccggcgataatcagcgggatcgccacgttatcgtagacagtacggtccatcagtagatggtgatcctggaaaatcatgccaatctggcggcgcagaaacggaacttcacggtttttcagacgcgtgatgtcatggccgctaaaccagattttcccggcgctgggccgctcaatcccacagatcagcttcaggagggtacttttccctgcgccggaatgaccggtcagaaacgccatctcacccggctgcatatggaacgtaacgccctgcagcgcctgtctcccaccgagataagccttgctgacatgttcaaagcgaatcattgttaatcctctcgggcaaaaagtgcctctataaagtcgtccgccttaaacggacgcaaatcctcaatacgttcgccgacaccaatgtagcggatagggataccaaactggtcagccacgctgaaaattaccccgcctttcgccgtgccgtccagtttcgttagcgtgatgccggttaagccaacggcttcatggaacagtttggcctggcttaccgcgttctgcccggtgctggcatcaatagtcagcataacttcatgcggcgcttcaacgtcgagtttcttcatcacgcggacgattttcttcaactcttccatcaggtggcttttgttctgcaggcgtccggctgtatcggcaatcaggacgtcgatattacgcgctttagctgcctgaatggcgtcgaagataacagaggcggaatccgccccggtatgctgggcaatcaccggaatattgttgcgctgaccccagacctgaagctgttcaaccgcagctgcacggaaagtatcacccgccgccagcatcacgcttttaccctgctgctcaaactgacgcgccagcttaccaatcgtcgtggttttacccacaccgttgacgcccaccatcaggatcacaaacggcgctttgccttcaacattcagcggctcatcgactttcgccagaatctcgcccatctcttctttcagcaggccatagagcgcctcggcgtcacgaagctgcttgcgggatgcgccttccgtcagattggtgataattttacgtgtggtttccacacccacatcggcgatcaaaagctgctcttccagctcctcaaacagatcatcgtcgatttttttaccgcggaacaggctgataaatccggaaccgagattttctttggtttttaacaggctgcgtttcaggcgcgcgaaaaaaccttctttggtcggtttttcctgctcctgagcgatttcttccaccggctgctcttcttctgccggaggaaccaccatcaccgcctcttctgccgcttcggcagccagcgccgtttccagctcttcgtcggtaatttcttctttagccgcttcttcttccgccgcttcgacaatctctacggtttccgcttcagcctgccactcttctgggctaaccgcttcggcgttgacgtcttccggcaacggcagctcttcacgttcgatagccactggctccggcgtttcttctacgaccggttccggctgtgcaacgacttccgcttcaggctgcgctttttcactttcagcaacctgttcagtgacttccacaacgtcggcagcaaaagtttccgcctcggcttcagtatgcgcttgcggctgctcttcaacggcttgttcagaggccttcacaggctcttgcgcctgaacgatttcttctacaaccggttgttcattctgaacttctgtctctttttccggggtctgctctttttgaccaaagcccagccaggaaaaaaagccacgttttttttctttcgccatttgcgactacactcctcgctgttgcttcatggcacagcgttaacgctatgtacatagcagctaaaaaaatgatgaaatagtctatcacttaacttaattcacatcaccgcctgcaagtatgtgttatctggcggattgagcaatttatcatgaaaaaaccgaatcattccggcagcggccaaatccgcattattggcgggcagtggcgaggccgtaaactcccggttcctgatagcccaggtctgcgccccaccaccgaccgcgtacgcgaaacgttgtttaactggctggctccggtcattgttgacgcccaatgtctggattgcttcgccgggagcggcgcgctggggctggaagcgttaagccgctacgctgcgggggcaacgttgattgagatggatcgcgcggtttctcagcagttaattaagaatctggcgacactaaaagcaggcaatgcacgcgtggtgaacagcaacgcgatgagtttcctggcgcaaaaaggtacaccgcataatatcgtgtttgtcgatccaccgttccgccgtggcttgttagaagagacgataaatttactggaagataacggctggctggctgacgaagccctgatttatgtcgaaagcgaagtcgaaaacggtctgcccactgttccagcaaactggagtttacatcgggaaaaagtggcgggtcaggtggcttatcggctgtatcaacgcgaagcacaaggagaaagtgatgctgattaatattggtcgtttgttaatgctctgcgtttggggatttttaatcctcaacctggtgcatcccttcccacgcccgctgaatatcttcgttaacgtggcgctgatttttaccgtgctgatgcatggtatgcagctggcgctattgaaatccactttaccgaaagatggcccgcagatgaccaccgccgaaaaggtacggattttccttttcggcgtgtttgaactgctggcctggcagaagaaatttaaagttaaaaaataaccttattgttcgcctacaaagctgacaaagcgcgttcctttatagctcagcgtacctttatcgcccactgtcagggcgtggtactgctgggcgtcgaggcgaaacgtctgctccattcctccgctttgcggtttgaagcttgcctcatagcgtatactggtgcctgccggagtcacttcctgctggcggctacggcgatcgttaatcggtttttcccgcttgttgctcaccaccaccagcttttgctggagcggagccatatcattatcagctttttcccgtcgctgttgcataaaacgaaagcttgcggcgacgacaattaagccaatgataacaataaagaaaagaggtggtttgctcatctttatccctcatcggaaaatgcggaaataagcataccctgccagttatggtgttgtcatccgtccaccctcgccactaaactggaagcaagaccgtaggcattccgcttacgaaaaaataacgaattcaaggaactaagatgctttggagctttatcgctgtctgtctttccgcatggctatctgtggatgcaagctatcgtgggccaacctggcaacgctgggtgtttaaaccgttaacccttcttctcctgctgttactggcctggcaagcgccgatgttcgacgccattagctatctggtgctggcagggctgtgcgccagtctgctgggcgatgcgctaaccctgttgccacgtcaacgtctgatgtacgccatcggcgcgtttttcctcagccacctgctgtacaccatctatttcgccagtcagatgacgctctctttcttctggcctctaccactggtgctgctggttctgggtgcgctgttactggcgattatctggacgcgcctggaagagtaccgttggcctatctgcacgtttatcggcatgacgctggtgatggtgtggctggcaggtgaactgtggttcttccgtccgaccgctccggcgctctctgcgtttgttggcgctagcttgctgtttatcagtaactttgtctggctggggagccactatcgccgacgcttccgtgcggataacgcgattgctgcggcctgctactttgccggtcacttcctgatcgtccgcagcctgtatctctgataaaacttgactctggagtcgactccagagtgtatccttcggttaatgagaaaaaacttaaccggaggatgccatgagcactcctgacaatcacggcaagaaagcccctcaatttgctgcgttcaaaccgctaaccacggtacagaacgccaacgactgttgctgcgacggcgcatgttccagcacgccaactctctctgaaaacgtctccggcacccgctatagctggaaagtcagcggcatggactgcgccgcctgtgcgcgcaaggtagaaaatgccgtgcgccagcttgcaggcgtgaatcaggtgcaggtgttgttcgccaccgaaaaactggtggtcgatgccgacaatgacattcgtgcacaagttgaatctgcgctgcaaaaagcaggctattccctgcgcgatgaacaggccgccgaagaaccgcaagcaagtcgcctgaaagagaatctgccgctgattacgctaatcgtgatgatggcaatcagctggggtctggagcagttcaatcatccgttcgggcaactggcgtttatcgcgaccacgctggttgggctgtacccgattgctcgtcaggcattacggttgatcaaatccggcagctacttcgccattgaaaccttaatgagcgtagccgctattggtgcactgtttattggcgcaacggctgaagctgcgatggtgttgctgctgtttttgattggtgaacgactggaaggctgggccgccagccgcgcgcgtcagggcgttagcgcgttaatggcgctgaaaccagaaaccgccacgcgcctgcgtaagggtgagcgggaagaggtggcgattaacagcctgcgccctggcgatgtgattgaagtcgccgcaggtgggcgtttgcctgccgacggtaaactgctcagtccgtttgccagttttgatgaaagcgccctgaccggcgaatccattccggtggagcgcgcaacgggcgataaagtccctgctggtgccaccagcgtagaccgtctggtgacgttggaagtgctgagtgaaccgggagccagcgccattgaccggattctgaaactgatcgaagaagccgaagagcgtcgcgctcccattgagcggtttatcgaccgtttcagccgtatctatacgcccgcgattatggccgtcgctctgctggtgacgctggtgccaccgctgctgtttgccgccagctggcaggagtggatttataaagggctgacgctgctgctgattggctgcccgtgtgcgttagttatcagtacgcctgcggcgattacctccgggctggcggcggcagcgcgtcgtggggcgttgattaaaggcggagcggcgctggaacagctgggtcgtgttactcaggtggcgtttgataaaaccggtacgctgaccgtcggtaaaccgcgcgttaccgcgattcatccggcaacgggtattagtgaatctgaactgctgacactggcggcggcggtcgagcaaggcgcgacgcatccactggcgcaagccatcgtacgcgaagcacaggttgctgaactcgccattcccaccgccgaaagtcagcgggcgctggtcgggtctggcattgaagcgcaggttaacggtgagcgcgtattgatttgcgctgccgggaaacatcccgctgatgcatttactggtttaattaacgaactggaaagcgccgggcaaacggtagtgctggtagtacgtaacgatgacgtgcttggtgtcattgcgttacaggataccctgcgcgccgatgctgcaactgccatcagtgaactgaacgcgctgggcgtcaaaggggtgatcctcaccggcgataatccacgcgcagcggcggcaattgccggggagctggggctggagtttaaagcgggcctgttgccggaagataaagtcaaagcggtgaccgagctgaatcaacatgcgccgctggcgatggtcggtgacggtattaacgacgcgccagcgatgaaagctgccgccatcgggattgcaatgggtagcggcacagacgtggcgctggaaaccgccgacgcagcattaacccataaccacctgcgcggcctggtgcaaatgattgaactggcacgcgccactcacgccaatatccgccagaacatcactattgcgctggggctgaaagggatcttcctcgtcaccacgctgttagggatgaccgggttgtggctggcagtgctggcagatacgggggcgacggtgctggtgacagcgaatgcgttaagattgttgcgcaggagataaggcaaaccgatcgcaacattgagcgcgatcggtcccctcgcccctctggggagagggttagggtgaggggaaaaggcggcatcgaagccaatcagcccctatcaaccgcctttacgaatcaaataacgataaggcagtccatccgtctctttagcaaccagttcgtgttccataaaggtacaaaacccaggaatatcgcgggtagtggccggatcgtcggcgataatcagcaacgtttcgccaggctgcatattgcgcacggttttgcgcaccatcatcaccggttccgggcagcgcaggccaagcgcgtcgagtgtgtggtcagggctggaaaagagatcggtcattttcttctcatcacttaaaaaaacggcgctagtttacgccctgtgagtccgtaagcaaactaggttaacgattgcgtgaaaattaaccattgcattgtcaacgtaaagcagtatcatgcggcggctcgaaaaaagggtaagcacgttattatgttaaggtaacagacgtgtcgtacgtattgggttccctcaccccaatggttaatcaaaaaggtacaatatgaacgttttcagccaaactcaacgctataaggcgttgttctggttaagcttatttcatctgctggtgatcacctccagtaactatctggttcagcttcccgtctccattttgggtttccataccacctggggcgcgtttagctttccgtttatttttcttgctaccgacctgaccgtgcgtatttttggcgcaccgctggcccgacgcattatcttcgcggtaatgatccctgcgttattaatctcctacgtcatcagcagcctattctatatgggttcctggcagggattcggcgcactcgcccacttcaacctgtttgtcgcccgtatcgccaccgccagtttcatggcctacgcgctggggcaaatcctcgacgtgcacgtttttaaccgcctgcgtcagagtcgccgctggtggctggcaccgacagcgtccacactgttcggtaacgtcagcgacacgctggcctttttcttcattgccttctggcgtagcccggatgcctttatggctgaacactggatggaaatcgcgctggtcgattactgtttcaaagtgttaatcagtatcgttttcttcctgccaatgtatggcgtattactcaatatgctgttgaaaagactggcagataaatccgaaatcaacgctttgcaggcgagttaaaggttcgttatcagagttgtgataagatggatgaatgagccgttatggccgtttatcgaaaggaagaagtcaatgcgcaatctggttaaatatgtcggaattggcctgctggttatggggcttgcggcctgtgatgataaagacactaacgctacggcgcagggtagcgtcgcggaaagtaacgctaccgggaatcccgtcaacctgcttgatggcaagttaagtttcagcctgccagcggatatgaccgaccagagcggtaagctgggaacgcaggccaataacatgcatgtctggtccgacgccaccgggcagaaagcagtcatcgtcatcatgggcgatgatccgaaagaagatctggcggtgctggcgaagcgtctggaagatcagcaacgtagccgcgatccgcagctgcaagtggtaaccaataaagccattgagctgaaaggtcacaaaatgcagcagttagacagtattatctccgcgaaaggccagacggcgtactcttccgttattctgggtaacgtgggtaatcaactgctgaccatgcaaattacgctgcccgctgacgatcagcaaaaagcgcagaccaccgcagaaaacatcattaatacgctggttattcagtaagttttaagaactactggcggcctcagggacgtgttccggaggccgtttttttaatcgccacgtcagtaataacgcgattgcgaccagtcccgccgccgccagataaatcaccggtacgcccgcccagctcatcaccagcccagccagtggtccagtcacgccaaggcttaaatccataaatacggtgtaagttgccagcgccgccccctgattttgctgcggaaccgcttttaccgccactacacccaatgccgggaacaccaggctaaacccggcccccgccagtaagacgccgattttcgccatccacggcatagtcgccacgccaaccagtagcaggccgattatctcaacgctaaagcaaatcatcgctacgtttaagccaccgatacggttaatgccgttagggaataacaaacgcgtaccgacaaacgcacagctaaacagcgtcagcgcgaaagccgcaccgtcccaacctttagcgtcataaaacagcgtgataaaggtggcgatgacgccaaatccggcggaagccagtgccagcgccataccgtacagccagacgcgcccaagcaccgcgcgaaacggcagcggtttgcctttactggcttttaccgtcggacgcgggatcgccaacaaaatggccaccagcgccacgcccataatgattaacgctaacgcctgcaagccgccccagtgataaaacacgacgcctaacggcgcacccatcgccatcgccccgtaagtgacaatgccgttccagctaatcacccgcccgatatgcaggctgccaaccacgccaacgccccatagggtgcttcccgttccggcaaaactttgcccaatcccaaggatgacgcgccccaggcaaagtaataacaggctgatgacaggcagactggcggttaatcctgccgtcagataccccagaccgctcaaaaagcagccgcataaaccgaagacgacaatctttttgggtcccaggctatcggcgtaacgtccggcatgagggcggctcagcaaggtggcgaaatattgcaggctgataaccaatcctgcccagaaggcgctaaagcccatcacatcatggacatagcccggtaatacagcgagcggcaacccgatggtgaggtagctggcgaagttaaacatgactatagagacaatgcgcaaattcaggcgcaatccgtttagcgcgggttcggctacgggttcgggcatgaggatcaccacatttttacaacagtgtttcatttttaccacgtgctgacgtgaaaatcagcagtaagaatcagaatattgctggcgtgactcccgctacacttaatacaaaaagtcacaaggaagccccaatggaaacccctcaacccgataaaacgggcatgcacattctgctcaagctggccagcctggtagtgatcctcgcgggcattcacgcagcggcagatatcattgtgcagctgttactggcgctgttttttgccatcgtcctcaacccgctcgtcacctggtttattcgtcggggagtacaacgccccgttgccattacgattgtagtggtggtgatgctgatcgcactaaccgcgctggtcggcgtactggcggcaagctttaacgaatttatctctatgctgccgaagtttaataaggagctgacgcgcaaactttttaaattgcaggagatgttgccttttcttaatttgcatatgagcccggagcgaatgctgcagcggatggacagcgaaaaagtggttaccttcaccacagcgctaatgaccgggctttccggggcaatggcgagcgtgcttttgctggtgatgaccgtagtttttatgctgtttgaagtgcgccacgtcccttacaaaatgcgttttgcgctgaataatccacagattcacatcgcgggattacaccgcgcacttaaaggcgttagccactatcttgcattgaagacgctactcagtttatggacaggtgtcatcgtctggctggggctggagctgatgggggtgcagtttgcgctgatgtgggcagtactggcgtttttgctcaactacgtgcccaatatcggcgcggtaatttccgccgtaccgccaatgattcaggtgctgctgtttaatggtgtttacgaatgtattctggtcggcgcattgtttttagtggtccatatggtcatcggcaatattttagaaccacggatgatgggccatcgcctggggatgtccaccatggtggtatttcttagtttgttaatttggggatggctgctcggcccggtagggatgctacttagcgtgccattaaccagcgtgtgtaaaatctggatggaaaccaccaaaggcggtagcaaactggcgattttactggggccgggcagaccgaaaagtcggttaccgggatgaggcgacaagtgatacgatacgcactttcattttccattaaacgttggccctgatatgtatcggatagttctggggaaagttagcaccttaagcgcagctccactgccaccgggtttacgcgagcaagcaccgcaaggtccacgacgcgaacgctggctggcggggcgtgcattgcttagccacacgctttccccgctaccggagatcatctatggcgaacaaggcaaacctgcatttgcgccggaaatgccgctatggttcaacttaagccatagcggtgacgatatcgccctgctgttgagtgatgaaggcgaagtcggctgcgatatcgaagtgattcgcccgcgcgccaactggcgctggctggcgaacgccgtattcagcctcggggaacacgctgagatggacgccgtgcatcctgatcagcaactggaaatgttctggcgcatctggacgcgcaaagaagccatcgttaaacagcgtggcggcagcgcctggcaaatcgtcagcgtagacagcacctatcactccagcctgagtgtcagccattgtcagcttgaaaatttaagccttgcgatctgcacccctactccctttacgctcaccgccgacagtgtgcaatggatcgatagtgttaactgatccgcccacccgactgcccatctattgatccagaacaggtaatcagtatgacgaatacttaaaatcgtcatacttatttccgccatctattttaatccattggggttaccatgctctccacactccgccgcactctatttgcgctgctggcttgtgcgtcttttatcgtccatgccgctgcaccagatgaaatcaccaccgcctggccggtgaatgtcgggccactaaacccgcacctttacacgcctaaccagatgttcgcccagagcatggtttatgaaccattggtgaaatatcaggcagacggtagcgtgatcccgtggctggcaaaaagctggactcatagtgaagatggtaaaacctggaccttcaccctgcgtgatgacgtgaaattctccaacggtgaaccgttcgatgccgaggcggcggcagaaaacttccgcgcagtgctcgataaccgtcaacgtcacgcctggctggagctggcaaaccagattgttgatgttaaagcactcagtaaaacagagctgcaaattaccctgaaaagcgcctactatcctttcctgcaagaactggccctgccccgtcctttccgttttatcgctcccagccagtttaaaaaccatgaaaccatgaacggaattaaagcgccgattggcaccggaccgtggattttgcaggaaagcaaactgaatcagtacgatgtcttcgtccgtaacgaaaactactggggcgaaaagccagcgattaaaaagatcacctttaacgtcatcccggacccgactacccgcgcggtggcgtttgaaactggcgatatcgacctgctgtacggaaacgaagggttattaccgctcgataccttcgcccgctttagccagaatccggcttaccacacccaactgagtcagccgatcgaaaccgtgatgctggcgctcaataccgccaaagcccccaccaacgagctggcagtacgtgaagctcttaattacgcggtaaacaaaaaaagcctgattgataacgcgttgtatggcacccagcaggtcgccgacaccctgtttgccccttctgtgccctacgccaacctcggcctgaaaccgagccagtacgatccgcaaaaagcgaaagcgttgctggaaaaagccggttggacgctgcctgcgggcaaagacatccgcgagaaaaatggtcagccgctgcgcattgaacttagcttcatcggcaccgatgcgttaagcaaaagcatggcggaaatcattcaggctgatatgcgccagattggcgcagatgtcagcctgattggcgaagaagagagcagtatctatgctcgtcagcgcgacggtcgttttggcatgattttccaccgcacctggggcgcgccatatgatccacacgccttcctcagtagtatgcgcgtaccgagtcacgctgacttccaggcacagcaaggattagccgacaaaccgctgattgataaagagatcggcgaagtgctggcgacccatgacgaaacgcaacgtcaggcgctgtatcgcgacattctgacccgtctgcatgacgaggcggtttatctgcctatcagttacatcagtatgatggtggtaagtaaaccggagctgggtaacatcccctacgcgccgatcgccaccgaaattccgttcgaacagattaaaccggtgaaaccttaatgttgcgttacgtattacgccgctttctgctgctgatcccgatggtgctcgccgccagcgtgatcatttttctgatgctgcgcctcggtaccggcgacccggcgctcgattatttgcgtctgtctaacctgccgccgacgccggagatgctggcctctacccgcaccatgctgggactggatcagccgctgtacgtccagtacggcacctggttgtggaaggcgctgcatcttgactttggtatcagtttcgccagccaacgcccggtactggacgatatgctgaacttcctgcccgccacgctggaacttgcaggtgcggcgctggtattaattctgctcacttccgtaccgctcggtatctgggcggcgcgccatcgcgaccgtctgccggatttcgccgtacgtttcatcgcgtttcttggcgtgagcatgcctaacttctggctggcgtttttactggtgatggcgtttagcgtgtatctgcaatggctacccgcgatgggttacggcggctggcagcacatcattttgcctgcggtttccattgcctttatgagcctggcgattaacgcgcgtttactgcgcgccagtatgctggacgtcgccggtcagcgtcacgtcacctgggcgcgtctgcgcggcctgaacgacaaacagaccgaacgtcgccacatcctgcgcaatgccagcctgccgatgatcaccgccgtggggatgcatatcggcgaactgattggcgggacgatgattatcgaaaacatctttgcctggccgggcgtcgggcgctatgcggtgagcgcgatttttaaccgtgactatccggtgatccagtgctttacgctgatgatggtggtggtttttgtggtctgtaatttgattgtcgatttgctcaacgccgcgctggacccgcgcattcgtcgtcatgaaggagcgcacgcgtgaactttttcctctcttcccgctggagcgtacgcctggcgctgatcattatcgccctgctggcgctgattgcgctcaccagccagtggtggctgccgtatgacccacaggcgattgatttgccgagccgcctgcttagcccggatgcgcagcactggctgggcaccgatcacttaggtcgcgatattttcagccggctgatggcagcgacccgcgtgagcctcggtagcgtaatggcctgcctgctgctggtgctgacattagggctggttattggcggcagcgccgggttgattggcgggcgcgttgatcaggccaccatgcgcgtcgccgatatgtttatgaccttcccgaccagcattctgagcttctttatggttggcgtgctcggcaccgggctgaccaacgtaattatcgccatcgccctgagccactgggcgtggtatgcacgcatggtgcgcagcctggtgattagtctacgccaacgcgagtttgtgctggcgagtcggctttccggtgcgggccatgtgcgggtgtttgtcgatcatctggcaggcgcggtgatccctagcctgctggtgctggcaacgctggatatcggccatatgatgctgcacgtcgcggggatgtctttccttggcctcggtgtgaccgcgccgaccgccgaatggggcgtgatgattaacgacgcgcgccagtatatctggacccagccgctgcaaatgttctggccggggctggcgctgtttatcagcgtgatggcctttaacctggtgggtgacgcactgcgcgatcatctggaccctcatctggtgacggagcacgcacactaatgccgcaacagattgaactacgtaatatcgcgctacaggccgcgcagccgctggtacacggtgtaagcttaaccctgcaacgcgggcgcgtgctggcgttagtcggcggtagcggcagcgggaaaagtttaacctgcgccgcaacgctgggcattttgcccgctggcgttcgccagacggcgggggaaattttagccgatggcaaaccggttagcccttgcgccctgcgcggcatcaaaattgccaccatcatgcagaacccgcgcagcgcctttaatccactgcacaccatgcacacccacgcgcgggaaacctgcctggcgttagggaaacccgccgatgacgctacgcttaccgctgccatagaagcggtggggctggaaaacgccgcgcgcgtgctgaagctgtacccgttcgagatgagcggcggcatgttgcagcgcatgatgattgcgatggcggtgctgtgtgaaagtccgtttatcatcgccgatgaaccgaccaccgaccttgacgtggtagcacaggcgcgcatcctcgatctgctggaaagcattatgcaaaaacaagcgccgggaatgctgctggtgacccatgatatgggcgttgtggcgcgtctggcggatgacgtggcggtgatgtctgacggtaagattgtcgaacagggcgatgtagaaacgctgtttaacgcccccaaacatacagtgacgcgcagcctggtttccgctcatctcgccctctacggtatggagctggcaagttgacctaatacggtatggagctggcatcatgactttacttaacatctccggcctttcccatcactatgcgcacggtggatttaacggaaaacatcaacatcaggcggtgctgaataacgtttccctgaccctgaaaagcggcgaaaccgtcgccctgctggggcgcagcggctgcgggaaaagtaccctcgcgcggttgctggtgggtttagaaagccccgcgcaggggaatattagctggcgtggcgaaccgctggcgaaactcaatcgcgcccagcgtaaagcgttccgccgcgatattcagatggtatttcaggactccatcagcgccgtgaatccgcgcaaaaccgtgcgcgagatcctgcgtgaaccgatgcgccacctgctaagtctgaaaaaatccgaacaactggcgcgcgccagcgaaatgctgaaggcggtcgatctcgatgacagcgttctcgacaaacgcccaccgcagttaagcggcggccagctccagcgcgtctgcctggctcgcgcgctggcggtcgaaccgaaactactgattctggatgaagccgtttctaaccttgatctcgtgttacaggcgggtgtcattcgcctgctgaaaaagctacaacaacagtttggcaccgcctgcctgttcatcacccacgacttacgcctggtagaacgcttttgccagcgggtaatggttatggacaacggacaaatcgtcgaaacccaggtggtgggagagaaattaaccttttcctctgacgccggacgtgtgctacaaaacgcggtattacccgcattccccgtgcgccgtcgcaccacagaaaaggtttaacgcaaatgcaacgagtcaccatcacgcttgatgacgatttactggagacgctggacagcctgagccagcgtcgtggttataacaaccgttccgaagctatccgcgacattctgcgtagcgccctggcgcaagaggccacccagcagcacggcacgcaaggtttcgcggtgctgagctatgtgtatgaacacgaaaaacgcgacttagccagccgcattgtctccacccagcatcatcaccacgacctctccgtcgccacgctgcatgtgcacatcaaccacgacgactgtctggaaatcgccgtgttgaaaggtgacatgggtgacgtgcagcattttgccgatgacgttatcgcccagcgcggcgtgcggcacgggcatttgcagtgcttgccgaaggaagattgagttacgccattgtcccaatcgtcttcctgaatcgcagcagcgcaatggtgaaaaatgcgccgccaattgccatcagcgtcagaaactgcggccagacgatttcgaatccggcaccccggtagaggatggcctgcgcgaggctaacaaagtgtgtcgtcggcatggtcagcataatgtcctgcaccatctgcggcatactttcgcgcggcgtggaaccaccggaaagcatttgcagcggcagcagcaccagaatcaccagcagccccagttgcggcatactacgcgctatcgtccccataaaaatgccgatactcgtggtggcaaacagactgagcgccacgcccagcataaacagcgggatgctgccttcaatcggtacgcccagtacacctttcaccatcagcaccaggcttaatccgcttaccaccagcaccaccagccccatgctccagatcttcgccatcatgatctcaaacggcgttatcggcatcaccagtaagtgttccaccgtgccgtgttcacgctcgcggatcagcgcgcttccggtcaatacaatcgccagcatggtaatgttgttgatgatcgccatcaccccgccaaaccacgcgggatcgaggttcgggttaaagcgcatccgggtttccaggcttaccaacggttcgctgttatcacggtagcgcgcgacaaagctgttcacttcaccgttgataatattctggatatacccattgccggtaaatgcctggctcatgcgcgtggcatcgacgttcacctgaatatccggctggcgtccggcgaggacatcacgctgaaaattaggcggaatatttatcgcgaaggtatagcgtccggcgtccagtccggcatccatctcatcggcggtgatcatctccggtggcaaaaaccacggacgatagaagctgttaacgatccggttgcttaactggctttgatccatatcggcaatggcgatcggcgcgaggttcaagcttcctggcgtaacggtcgcactgctatacacgctcaccgtaaagctgaagacaatcagcgtcagcatcgctttatcaccgagcagactgcgcaactctttgatacccagattaaaaatattgcgtaaatggcgcatcatccctcctgttttttcagcagcaggatacttaagcccatcaccagcgggatggctatcagtaacgggataaaaagttgccacaaatcagtcagatccagcgctttgctgaacgtcccgcgggcgatagtcagaaaatgactggtcgggtaaacctcgccgatccaacgtccaggcccttccaggctagctaccggatcgatcatcccggaaaactgtgtcgccgggatcaacgtgataatcgccgttccgaaaatggcggcaatctggcttttcataaaggtggagatcagcagccccattccggtggcaatgatgatatacagcagcgccgccagggtgagcgtcaggaaactgcctttatgcggtacgccaaacacaaacacgctcaggccgcagagcaggaaaaagttcagcatccccagcgcgatgtatggcaactgtttaccaagcaaaaattcactacgcgtggtgggggtcacgtaaaggttgataatgctcccaagctctttttcccgcaccacgctaagggcgcttagcatactcgggatcatcatcagcagaagcgggatcaccgccggaacaatcgctggcaggctttttacgtccgggttatagcgatagcgcgtctcaatattcatcagcccgctttggctggcgggtgtgctttgtcggctcgccacatcctgtaaccagctctggtgcatggcctgcacgtaaccttttaccgtttcagcacggctcggcatcgctccgtcgatccagacgccgagttccacaggcgtaccacgcgcgatatcgcgcccgaaattgggcgggatctcaatcgccaccgtgatatcgcccgcacgcatccgacgatcaagctcgtcataactggtgagcggcggctgttcgataaagtaacgggaaccggagaggttgagtgtccacgcctggctactgacggtctggtcgcggtcgagcaccgcaaagcgcaggttttccacatccatactgatgccgtaacccattatcagcatcaggatcaccgttcccatcagcgccagcgtgctacgtactggatcgcgtcgcagttccagcgcttcgcggcggctgtagctaaacagacggcgcaggctaaatccctgacgcggcgcgtgggtggtgtcgtgtaccacgggcggcgcttcggcttcgttgctctgccctgccgcttcctgcaaataggcgataaatgcctcttccagactggcggctccgcgtttctcaaccagttcctgcggtgtaccgctggcaagcacttttccggcgtgcatcagactgatgcggtcgcaacgttccgcttcgttcataaagtgggtggagatgaagatagtcactttgtcctggcggctgagatcgaccatcaactgccagaacatatccctcgccaccggatcgacaccagaagtaggctcatcgaggattaacatctccgggcgatgaatcaccgccaccgccaggctaagccgctggcgaatgccgagcggcaaactctccggcagaatatcttcaacgtcgttgagcttaaaacgctcgctcatttcagccactcttgcgggaatttccgcttccgggatgtgaaacaaacgggcatgtaactcaaggttttgccgcacggtgagttcgttatagaggctaaacgcctggctcatatagcccacccgacggcgggtatcgatatcttttggatcaaccggttgcccgaacagccacgcctcaccttcgctggcgggcagcagtccggtgagcattttcatggtggtggatttaccgcagccgttgctaccaagaaaaccaaaaatctccccgcgtggaatgcggaaattaacgtgatcaacggcaacgaaggaaccaaaacgcatggtcagatcgcgcgcttcgatggcaatctctgcgttttcaggttgatacggtgggatcactaccgcctgatgcgcctggcgttgcgcttgcggtaacagatttataaatgcttcttccagcgtagcgctttgcgtttgctgccgtagctcttcggcgctgccagttgccagcacttctccggcattcatcgctaccagccagtcgaagcgttcggcctcttccatataggcggtggcgaccagcacgctcatattgctctgccgctggcgaatactgtcgatcagatcccagaactgggagcgggagagcgggtcaacccccgttgttggctcatcaaggatcaacagttccgggtcgtggattaacgcgcagcacagcccaagtttttgcttcatcccgccggagagtttccctgccggacgatcgcgaaacggtgctaacccggtgctggtcagcagctcattgattcgcacttcccgctccgctttgtcgtgaccgaacaggcgagcgaaaaaatcgacgttttcatacacgctcaaggtgtggtagaggtttttgcccagcccctgcggcatccaggcgatgcgcgggcagacgtcgcggcgatgcttcgggtcgcgcatatcgccgcccagcaccatcacattgccctgttcaatgacgcgggcaccggaaatcaagctcaacaagctgctcttcccgacgccgtccgggccaatcagcccgaccatacagcgggccggaatatcgagagtgatattgttcagcgcaacggtttttccataatgctggctcacgcccgccagttgcgcgacaggcgggacgggaaccagttccagatgcgtcattgcggcaacctcaccacgaggtcgtcaggccacggaagttcttcattcacccgcacccacgctacgcccggcaaaccggttttgacatattccagatgctgctggagtaattccggtgggatacgcgctttgacgcggaacatcagtttcagccgttcatcgctggtttcgacggtttttggcgtgaactgggcgacactggcgacaaaactgatggttgcaggaatacgcagatctggcgcggcatcgaggatcagccgggcttcaccgcccagtttcagcgtgcccgcctgttcggttggcaggaagaaagtcatatagacgtcgctgagatcgaccatattcagcacccgaccgcctgccgccagcacttcgcctggctcggcaacccgatactgcacgcgtccgtcacgcggggctttcagttcgctgtcatcgatatctgcggcaatgcgccgttcagtggcttgtgccgcttcgacgcgggtttgcgcctgaatgatattggtgcgtgccgcttctatagccgctttagaagcgcttacctgagctttcgcgctttccagcgcagctcgggcgctctcagcggcggcgcgatcgtcatccagctgttgcgcagaaatagcccctcgttgggccagactacgggaacgcgtatgacgttttgctacggagtccagttctgcctggcgttgattaaccaggctctgtgcggcacgagtttcgctttgtcgttgctccagcaaagcctgcgcggcagcaacggcgctttgtgcctctttgatttgcgcgatggcttccagtcgctgttcctgcaacacgcgagtatccatcttcgccagcacttcaccttcgcgaacaaacttgccttctttcaccagaatggtgtcgatacgcccggcaattttgctggcaatatccacttccgtcgcttcaatgcgcccattactgacagcaaagccttccggcacacctgccgggcgcaacagccaccacgccacgatagccgccaccgccagtaacccgacaacccaccacgccagatggcgcttactcttatccataatcgacccgccataatccctgtaagcaaacgacgcgtgttacaactgccgccgaacgacgttcagcggattcttccatccgggataagaaggaaacggcaaatacgaccagcgcgcagagcattgagcgccaacggggaaggcttagtgaaaacgggtagtaatgttgtcatcatcagcattcctggccgtaaatgaaacacgcatactcataagtgtgatctataaaactggctgacaaaacggtatccatcctgttggatagcgtttcacgcctgttcagttgcaggaacagagcattcctttttacgttttatcaacagtctcaaccagatagtaacattaatattcatgttgtctatggttcagagctgtaacattgtgcgccttctaatcaaaggcataagtccatttctgtttttttcatgctggtaagacttccagggagtggttatctcaggccctgcaccagggttaatttggcaattatgcatgctgaacattcttccagcatgtttactgtcacgggcgttaagacctaaaactgtccccgtttcgcctatgcgttctcttccaccatttccgttatgtgcaacaacttgatttatacctaacatttgactacatgctaatagtgcttcaagtttaggtctgtaatctgtgctaacagaaaaataacgattaaaggatcgacaagagatagcccggctagttttaaactttttgccattaattatagcatgatgctttttattgataattgccgctaattcgaccggatcgagagcattggtcatttcatcaatagagactgttatcggtcctataatgtaacgttttcgctgatcatcaaaagttatcccatgatgatttgccattattttgtatttggggtcatagaaacatacaggataatcttttatcccagagtaggtatcctcatcgagtggtttcatacgcgtgaagttctgcatatagttaccattgcaattcgtttcatgatttccagctaatacatgaacattttcattgatactcattatgcgttttaacaaatcgatgataaattgatcaccacagatattgctaaatcgatcgccggtttggtcgcccagaaacgtacatggcgtcacagcgtctttattaataactaaataaggctgaagactttctaaaataatgtctcttctgttcaggatactgattattgtattaacattagtgttaagttgctcattaaagttctcccttagcaatacgttgagaacttcatcttctatattaagcaactggctaaggaaattttctccttcagccatgattcccaaatgtcccgttgcgaaaagcgcgaacaaaactgcaccgacactgccatcggtatcaccaaaataggttggtctggtacttgtgggatcaacgggtaaacaattggagaaatagattctgtcagcgaactggggttttatcattgtttcgaatttaatatcagatacattatattggcttattttccagttccagatgggtttgtagctctcagtaactgcaacatcattagcattatcatttactgtcatattattaagtaaataaacaatactgcaccaattaatatcggtattatcaagagagcaaccgtaatttttgctattaattgtcacaataaactgataattattattcctacgtagaatatgagcacgcatgccgcttagcatactatatttttcactatgatccgtttgtatggtaaaactaattttgtcatcttgaatagattgttggaaccgttctatttgccaatcatctattttttccacaacctcaccgagcattgtcctggcaatactacttatatcatcacctataccatttgcaatatacccaaacagttctttagtgaagttggtaacatgctcttgcaccatatcatttgttgcgattgtcgttgtactgtcgttagtgcctgccacagttccaattttcatattttacctcatattatttaccgcgaggaatacatagttaacattttatcttatgacatacacctcatgttcgatgggaaaataattatattttgcacaaatcattcagcctcaaagcataatatgaaatttcttatctcatagcagagaaagtccctaaagattgtagaggcgtcatcagaacatgcctctacaatcgattaagaaaacctatgaaatactggcaggattaaaaagacataccaccgtattcatggagttttaatgtagttgaaaacaactaagcccactggaataaattattttattatttttatcacgtgcttccttcagggaatttagccccataataccattatcaaattgttgattatgatctaccccgggcccatgatgcccatatttttgtctaatgtatttgctggggtcttcacctttgagtgtctccccacatatgaagatacgttcacgtgctggtctgaaatcagtagtgttatcaaaataattagcatatacaggtgtgggtttcaaagtattgcttcggattagatggaatagaggatcatccatgtgttctttatgttttttattaaaaatattggctaattcctcaggatcagtaggatttttcatctgattaaatggaacctgcaaagcacgctgacaataacatttttttcttcatctcttattattccgtgatgactggttaaaacttgcctttcactgtcataattacaaacatcgagcgttttaattaagttatacgtatcaccggcagagagtttatgatttgctagtcgtgcagtatagttaccattaaaattgatttcatgatttccagccagaacgacgacatttttattaatacggctatctttattaccctccatatttcgcatagaatttagcaaagtaaggatatatttatcaccaaaaatagtactaaatctatcgcctgtatgatccccaaggaagatacaaggggttatcgcatcgtcctttaaaaaaacatgttgatgcaactcattcaagatcatgtctctcgtatttaataaatcgtagagcactttattatttttatgtttgtatgcagaactagccatctcttcgtgttttaataattcacataataaactccaacccttttccctgatgcctatatgcccactaacgagcaatgcataaagtacagcgcctactcttccatctgtatcgccaaaataagccgtgttggcattttgtgggttaatcacaccacactgtttatagaagtctattttactaaacacagatttaacatagctatcaaacttttccttagtaaacgtctctttagagacatcccaacgccagtcaggtttgaaattaccactaagaagagtaaagaaatttctcgctatgatagaaagcccatcaactttataaattatatcacttttatctccagaggaattaataaaataataaccgcccttacactcaacagtaacggtaatgggagagcttaattttaacacatggttattgtctggtataattgtaaagataaacgtatcagtagtattgtcggcgaatctattatattcttgaatatctatagaaggttcactattataaaaccatactttctccatctggtgactacgatcatttaccttccagtgaccatgttgcaggaaatagatgatatgcaggccaaaatcgttatctatttggctatcattatccagtttatcaaattcaactatctttgcacgatgtgttttatcaaccttgccatggtgttgatgactgttaactttatcactatgcttatcttgatggctactagagatgtttctaatctgattgtcaattgctttcataaataacctgtgatatttttgaattgtttgtaacaaaataaatgatacttgtctgaaaaacagatttacgacgatataaaataataatacttatatgttcgctgattttaagcaccgagactatccggtcttttaccaaataatgaagaataatccctccctggaagataattgtaaaaaacaacagcataagaattaatcttaggataaatttttatttatcatggccttttgaacgctgaaaagtagcgctctgcaaagtaaaccccgctatagttatgctatgcatttgtctttaatgatatctcgtcattatattaacaggatgaaattatcattaatgcatatttcaatattagcagggatacctgaggagtttaaagtgaacatatatatcgggtggcttttcaaattaatccctttgattatgggcttaatttgtatcgcgttaggtggctttgtgctggaaagtagtgggcaaagcgagtatttcgtcgcgggtcatgtgctgatttctctggcggccatatgcctggcattattcactaccgcatttattatcattagccagctcacgcgcggcgttaatacgttttacaatacattgttccccattattggctatgcggggagtattatcaccatgatatggggttgggcactgttagcaggcaatgatgtgatggcagacgagtttgtcgccggccatgttattttcggcgttggtatgattgccgcctgtgtaagcacggtggcagcgagttccggtcactttctgctcattcccaaaaatgcagcggggagcaagagcgacggaacaccggtacaggcttattctagtttaatcggtaactgcctcattgccgttcccgttttactcaccctgctcggtttcatttggtctattacgctgttacgtagtgctgacataactccgcattatgtcgcgggtcacgtattgcttgggttaaccgcaatctgtgcctgtctaattggccttgttgccacaattgtccatcaaacacgtaatacgtttagtactaaagaacactggctgtggtgttattgggttatttttctcggcagtatcacggtactgcaggggatatacgtcttagtcagttccgatgcaagcgcccgactggctcccggcattattcttatttgcctcggaatgatctgttacagcatattcagtaaagtctggctactggcactggtatggagacgtacctgtagcttagccaacagaataccgatgattcccgtcttcacctgcctgttttgccttttcctggcaagctttcttgcggaaatggcgcagaccgacatgggatattttattcctagccgagttctggtcggtttgggagcggtatgctttacgttgttcagtatcgttagtatattagaagcgggttctgctaaaaaataattgcaacgtaccggataaaaccagcgttgaccatttgcgtaacgctggtttttcttaggcatcatgaaataacgcagcattaatgcatagtggttaagtataaaaaacagcaaagttactgtttttttcaacctgttcatatttcataaagatctggccactgagtgagttttcaatcacctttccatccaccttatattaagcatggagggtttcagttcacgggctcattagaaaataatcacaagataaccactatcaaaattagctcatttttaatgcgactctaataattttcatctttaggaaataggtcaggagctctttgctgcaatcaaatcctgcgcacaagcccacgcactgctccacgcccactggaagttatagccccccagccagccggtgacgtccatcacttcgccgatgaagtacagcccaggcactttgcgcgcttccatcgtccgactagagagttcgttggtgtccacgccgccgagcgtcacttcggcagtgcgatagccttcagtgccgttgggttgtacgcgccagtcggtcaatgtgctaatcagtgcctgttggtcacgcacgttgagctgttttaggctaacatccgggatttgcccgagttgctgtaagcgttcaaccaaccgcttcggtagatgaaccgccagtgtgtttttcaggctttgattcggatgtgcgttacgctgctcattcaggaaggtttcgaggtccacatccggtagcagattgatgctgacaaattcccccggttgccagtagctactaatctgcaacaccgccggtccagacaagccgcggtgggtgaagagtaagttctcacggaaaacggtgccgttttcagcggtaatcacggaaggcaccgccacgcccgccagcacctgtaactcttcgagcaacggtttatgcagagtgaatggcaccagacccgcgcgggtcggcagcacgttgaggccaaattgttcggcaatcttataaccaaacgggctcgcgcccagccccggcatactcagcccaccagtcgcgatgaccagcttttcgcaaccgacagtcatgccgttcagatcaagcgtgaagcctgtttcatccttcgccacactcagcacttcgctacgcaatctgaaggtcacattgcccttctcgcactcatccaccagcatgtcgacaatctgctgcgcggagtcatcgcagaagagttgccctaacgttttctcgtgccaggcgatgccgtgtttattgaccagatcaatgaaatcccactgggtaaaacgtgcgagtgcagacttacaaaaatgcggattctggctcagataagcgcctggttcgacataaaggttggtaaagttgcagcgcccaccgccagacataaggattttgcgccctggttttttaccattatcgatcagcagaacccggcgtcctgcctgacctgccagcgcagaacagaacatacccgccgcaccagcgcctataataatggcatcaaacctttccacgttgcgctcctcttagaaaaaacgggcgtgaattgtaaagattcctcagtggtcgcaccagcatcaatattactaaaaggaagtatttgcctgaattatataagataattattttttgagtgaaatccatacagggggcaaatcaaaaaaagtctatatttcactttgcccgcgccgcgaaagtcactgataatgcgccgcgttcatgtcctcaaaatggcgtaacgtcctatgctacatttgtttgctggcctggatttgcataccgggctgttattattgcttgcactggcttttgtgctgttctacgaagccatcaatggtttccatgacacagccaacgccgtggcaaccgttatctatacccgcgcgatgcgttctcagctcgccgtggttatggcggcggtattcaactttttgggtgttttgctgggtggtctgagtgttgcctatgccattgtgcatatgctgccgacggatctgctgcttaatatgggaagctctcatggccttgccatggtgttctctatgttgctggcggcgattatctggaacctgggtacctggtactttggtttacctgcatccagctctcatacgctgattggcgcgatcatcgggattggtttaaccaatgcgttgatgaccgggacgagtgtggtggatgcactcaatatcccgaaagtattaagtattttcggttctctgatcgtttcccctattgtcggcctggtgtttgctggcggtctgattttcttgctgcgtcgctactggagcggcaccaagaaacgcgcccgtatccacctgaccccagcggagcgtgaaaagaaagacggcaagaaaaagccgccgttctggacgcgtattgcgctgatcctttccgctatcggcgtggcgtttagccacggcgcgaacgatggtcagaaaggcattggtctggttatgttggtattgattggcgtcgcgccagcaggcttcgtggtgaacatgaatgccactggctacgaaatcacccgtacccgtgatgccatcaacaacgtcgaagcttactttgagcagcatcctgcgctgctcaaacaggctaccggtgctgatcagttagtaccggctccggaagctggcgcaacgcaacctgcggagttccactgccatccgagcaataccattaacgcgctcaaccgcctgaaaggtatgttgaccaccgatgtggaaagctacgacaagctgagccttgatcaacgtagccagatgcgccgcattatgctgtgcgtttctgacactatcgacaaagtggtgaagatgcctggcgtgagtgctgacgatcagcgcctgttgaagaaactgaagtccgacatgcttagcaccatcgagtatgcaccggtgtggatcatcatggcggtcgcgctggcgttaggtatcggtacgatgattggctggcgccgtgtggcaacgactatcggtgagaaaatcggtaagaaaggcatgacctacgctcaggggatgtctgcccagatgacggcggcagtgtctatcggcctggcgagttataccgggatgccggtttccactactcacgtactctcctcttctgtcgcggggacgatggtggtagatggtggcggcttacagcgtaaaaccgtgaccagcattctgatggcctgggtgtttacccttccggctgcggtactgctttccggcgggctgtactggctctccttgcagttcctgtaatcgtacgcaccaaaacgagcgggtcagctggcccgcttcagattgtgacatagtgcgctttgttcatgccggatgcggcgtgaacgccttatccggcctacaaaaacatgcaaattcaatagattgcagagattatgtaggcctgataagcgtagcgcatcaggcaattttgcgtttgtaatcagtctcgagcgggtcagtttactggcccgctttttttatgcgttattattgctgaagtgcttaatgccaaatcatcaatgcaatcaggctgaccaccaccagaccacacaatgcgctggtcagaataaactgccgacgcacccgctcacagcggcgaataaattcatcatcgtgatgatcgcgataacgttgggcatagatataccaaacgagacgcacctgtttgttgggttggccatgattggtaaaaaagccccctccatcaacatattgatagagcaatggatcgcagttacgcagtaccactaacaacgcgcgtagactactgaaatagcgcgccatgttaacaatgcaaacgacacataaagcccaaaataatgcgacggtgcttatcatacctcctccccggcgacctgcccgcggagttccaccccggggctaccgctcccgatacgctgccaatcagttaacaccaggtcctggagaaaccgcttttgtggtgaccaacatacgagcggctctatagatagtgtaggagatcaggttgttttttttccagaaggttaaccactatcaatatattcatgtcgaaaatttgtttatctaacgagtaagcaaggcggattgacggatcatccgggtcgctataaggtaaggatggtcttaacactgaatctttacggctgggttagccccgcgcacgtagttcgcaggacgcgggtgacgtaacggcacaagaaacgctagctggccagtcatcgacaactttatggaaggagtaacactatggcttataaacacattctcatcgcggtcgacctctccccggaaagcaaagttctggtagagaaagcagtctctatggctcgcccctacaatgcgaaagtttctctgatccacgtagatgtaaactactctgacctatacaccgggcttattgatgtgaatctgggtgatatgcagaaacgcatctctgaagagacacatcatgcactgaccgagctttccactaatgcaggctacccaatcactgaaaccctgagcggcagcggcgacctgggccaggttctggtcgatgcaatcaagaaatacgatatggatttggtggtttgtggtcaccaccaggacttctggagcaaactgatgtcttccgcacgtcagctgatcaacaccgttcacgttgatatgctgattgttccgctgcgcgacgaagaagaataatcttccctctacgacgtgttcctgaacgcccgcatatgcgggcgttttgctttttggcgcgccttgttacctgatcagcgtaaacaccttatctggcctacggtctgcgtacgcaatcaaaatccccagccaatacaacatttaacaccatcatattttccatcattagtgtgatcatctggttattttctgttgtaatagtgtattaatctattcaccgcatcaatattaagaatctctgacagatgtaaactttttcgcgcgttatcccttacgcgttcatacttttcaggatggtattggaaggttaataaatatgaatacaacaacacccatggggatgctgcagcaacctcgcccatttttcatgatcttttttgtcgagttatgggagcgattcggctactacggcgtgcagggcgtactggcggttttcttcgttaaacagcttggattcagccaagagcaggcttttgtcacttttggtgcttttgctgcgctggtctatggcctcatttccattggcggctatgtcggcgaccacctgctggggaccaaacgcaccattgttcttggagcacttgtgctggcgattggctacttcatgaccggcatgagcctacttaagcctgacctgattttcatcgccctggggactatcgctgtcggtaacggcctgtttaaagctaacccagccagcttgcttagcaagtgctatccgccgaaagatccgcggcttgatggcgcattcaccctgttctatatgagcatcaacatcggcagcttgatagcgttaagcctggcccctgtgatcgctgatagattcggttatagtgtcacctacaacctgtgcggggcggggttaattatcgcattactggtttacatcgcctgtcgtggaatggtgaaagacattggttctgaacccgacttccggccaatgagcttcagcaaactgttgtacgtgttacttggcagcgtggtgatgatcttcgtatgcgcatggctgatgcacaacgtagaagtcgccaatctggtgctgattgttctctccatcgtcgtcaccatcatcttctttcgtcaggcattcaagctggataaaaccgggcgcaataaaatgtttgtcgcctttgtcctgatgctcgaagcggtggtgttttacattctctacgcccagatgccaacaagcctgaacttctttgccatcaacaacgtgcatcatgaaattctcggtttttccatcaacccggtcagcttccaggcgcttaacccgttctgggtggtactcgccagcccaatactggcaggcatttacacgcatctgggtaacaaaggcaaagacctcagcatgccgatgaaatttactctcggcatgtttatgtgcagtctgggctttttgacggcggcagctgcgggaatgtggtttgcggatgcacaagggctgacaagcccatggtttatcgtgctggtgtacttattccagagcttaggtgaactgtttattagcgcccttggcctggcgatgattgctgccctggtgccgcagcatttgatgggctttattctcgggatgtggttcctgacgcaggctgccgcgttcttgctgggcggctatgtggcaacatttaccgcggtgccggacaacattaccgatccgcttgagacgttgcccgtctataccaacgtgtttggtaagattggtctggtcacgctgggcgttgcagtagtgatgctgttgatggtgccgtggctgaaacgcatgattgcgacgccggaaagccattaattattcttgcagaaagcagggtagcgttatcgctaccctgttttagttttacactggcgtacctgcatagatatcaaagcgatgccctttagtgactaccgcgtttggcgtggcgacattcgccagcggtggcgcgtagtccgggcgctttaccaccacgcgtttggtcgccagcaagcgtgcaggctccagtaatccatcggcatcaagatccggtcccaccaggctctgaaagacacgcatctcttttttcactagcgcgcttttctgcttatgcgggaacatcgggtcgagataaaccacctgcgggcgcggggtaatatcagtcagcgccgtcaggctggaggcgtgaattaactgcaaccgctcctgcaaccagccgccgatttccgcatccgcataaccacgcgccaggccgtcgtcgagtagcgcggcaaccactggattacgctccagcatccgcacgcggcagccgacactagccagtacaaaggcatcgcgcccaagtcctgcagtggcatccaccacatccggcaaataatcgcctttaatgcccaccgctttcgccaccgcctcaccgcgaccaccgccgaatttgcgtcggtgcgccatcgctccgccaacaaaatcaacaaagatgccgccaagttttggctcatcacgcttgcgcaattccagatgttccggcgttaacaccagcgccatcaggttgtcttcatcgtgctccagcccccagcgggccgccagaacagataaggcaccgtctccggtgcctgtttcatcaattaagcagattttcactgaatgatcagcccttaatgccgtaatgctccagcatcgcatccagctgcggttcacgaccacggaagcgtttgaacagatccatcggctcttcactaccgccacggctcagaatgttgtcgaggaagctctgcccggtttcacggttgaaaatgccctcttcctcaaagcggctgaaagcatctgccgccagtacgtcagcccacaggtagctgtagtaacctgcggcataaccaccggcgaaaatatggctgaaagcgtgcgggaaacggccccaggacggagatggcaccacggcaaccagtttcttgatttctgccagagtttcgaggatttttgccccctgatccgggcggaactcggcatgaaggcggaaatcaaacaggccgaactccagctgacgcagaataaacagcgccgcctggtagttcttcgccgccagcattttatccagcaactctttcggcagcggttcgccggtttcatagtgaccagagataaacgccagcgcctccggctcccagcaccagttttccataaactgactcggcagttcgaccgcatcccacggcacaccgctgataccggaaacaccagcggtttcgatgcgggtcagcatatggtgcaggccgtgaccgaactcgtggaagagggtgatcacttcgtcgtgagtgaacagcgccggtttaccatttaccgggcggttgaagttacaagtcaaatacgcgaccggtttttgcaaagaaccatcagctttacgcatctggcctacgcagtcatccatccacgccccgccgcgcttgttttcacgggcatacagatcgaggtagaagctaccgcgcagttcgttattttcgtcatacagttcgaagaaacgtacatccggatgccagacatcaacatctttacgctctttagcggtgatgccgtaaatacgcttaaccacttcaaacaggccgttaaccgctttgttttccgggaagtacggacgcagctgttcgtcactgatgctgtagaggtgctgtttttgtttttcgctgtagtaagcgatatcccacggctgcaactcatcgacgccaaattcggctttggcaaaggcacgcaattgcgccagctctttttcgccttgtggacgcgcgcgttttgccagatcggttaagaaatccagcacctgctgcgggttttctgccattttagtggcaagggatttaaaggcgtagttttcaaagcccagcagttgcgccagttcgtgacgcagcgcgaggatctcttccatcaccttgctgttatcccatttaccggcgtttgggccttgatcggaggcgcgggtgctgtaagcgcgatacatctcttcacgcagagcctggttgtcgcagtaggtcattaccggcaagtagcttgggatatccagcgtcagcaaataaccttccagctctttcgcttcggcctgggcttttgccgcagccagcgcgctttctggcatccccgccagctccgcttcgtcggtaacgagtttggtccagcccattgtcgcatcgaggacgttgttgctgtactggttgcccagttcagaaagacgggtcgcaatttcgccgtaacgctgctgtttctctttcggcagacctatgccagagagttcaaagtcgcgcagtgcgttatcaaccgctttcttctgcgccgtgttcagcgtggcgtaatgatcgccatcgcgcaggtcgcgatacgctttatacagcccttcatgttgccctacccaggtgctgtattcgctcagcagcggcagggtttgttcgtaggcttcacgcagttccgggctatttttcacgctgttcaggtggctgaccggggagaagatacgccccaacacatcgtccacttccgccagcggctggcagagattttcccaggtgtacggtgccccttgcgctactacgcgctccacgttttcgcggcagtcgttcaatgccttagtcacggctggaacgacatgttccgggagaattttagaaaacggaggcaattcaaagggagtcagtaacggattcgtcattcgcgcagtcctggttaaagaggttaaggaagcgctcaacaggcgctttacataatgtgtgtagcatggggttaagtgtagtgaatttcaatgagaaacgttacgctttcgcggcggcggcctcttttcggtatactgtcctgatacgcttttgtgcgccccgaatacgggccgatttttacttaccggaacacctttacccatgctcagttatcgccacagctttcacgctggcaaccacgccgacgtccttaaacataccgttcagagcctgatcatcgagagcctgaaagagaaagataaaccgtttctctatctcgacacccacgcaggggccgggcgttatcagttaggcagcgaacatgccgagcgtaccggcgaatatctcgaaggcatcgcccgtatctggcagcaggacgatttgcccgcagaactggaggcgtacatcaatgtggtaaaacacttcaaccgtagcggtcagttgcgttactaccccggtagcccgttgattgctcgcctgctactgcgtgaacaggacagcctgcaactgaccgaactgcacccgagcgattacccgttgttgcgttctgaatttcagaaagatagccgtgcgcgtgtcgaaaaagccgacggtttccagcagcttaaggccaaactgccgccggtttcccgccgtggtttaatccttatcgacccgccgtatgaaatgaaaactgactatcaagcggtggtcagcgggatagcagaaggttacaaacgtttcgccactggtatttacgcactgtggtatccggtggtgctgcgtcagcaaattaagcgcatgatccacgatctggaagcgaccggtattcgcaaaattctgcaaattgaactggcggtactgccagacagcgatcgccgtggcatgaccgcttccggcatgattgtgattaacccgccgtggaaactggaacaacagatgaataacgtgctgccgtggctgcacagcaaactggttccggcaggcaccgggcacgccaccgtaagctggatcgtgccggagtaattgcagccattgctggcacctattacgtctcgcgctacaatcgcggtaatcaacgataaggacactttgtcatgactaaacactatgattacatcgccatcggcggcggcagcggcggtatcgcctccatcaaccgcgcggctatgtacggccagaaatgtgcgctgattgaagccaaagagctgggcggcacctgcgtaaatgttggctgtgtgccgaaaaaagtgatgtggcacgcggcgcaaatccgtgaagcgatccatatgtacggcccggattatggttttgataccactatcaataaattcaactgggaaacgttgatcgccagccgtaccgcctatatcgaccgtattcatacttcctatgaaaacgtgctcggtaaaaataacgttgatgtaatcaaaggctttgcccgcttcgttgatgccaaaacgctggaggtaaacggcgaaaccatcacggccgatcatattctgatcgccacaggcggtcgtccgagccacccggatattccgggcgtggaatacggtattgattctgatggcttcttcgcccttcctgctttgccagagcgcgtggcggttgttggcgcgggttacatcgccgttgagctggcgggcgtgattaacggcctcggcgcgaaaacgcatctgtttgtgcgtaaacatgcgccgctgcgcagcttcgacccgatgatttccgaaacgctggtcgaagtgatgaacgccgaaggcccgcagctgcacaccaacgccatcccgaaagcggtagtgaaaaataccgatggtagcctgacgctggagctggaagatggtcgcagtgaaacggtggattgcctgatttgggcgattggtcgcgagcctgccaatgacaacatcaacctggaagccgctggcgttaaaactaacgaaaaaggctatatcgtcgtcgataaatatcaaaacaccaatattgaaggtatttacgcggtgggcgataacacgggtgcagtggagctgacaccggtggcagttgcagcgggtcgccgtctctctgaacgcctgtttaataacaagccggatgagcatctggattacagcaacattccgaccgtggtcttcagccatccgccgattggtactgttggtttaacggaaccgcaggcgcgcgagcagtatggcgacgatcaggtgaaagtgtataaatcctctttcaccgcgatgtataccgccgtcaccactcaccgccagccgtgccgcatgaagctggtgtgcgttggaagcgaagagaagattgtcggtattcacggcattggctttggtatggacgaaatgttgcagggcttcgcggtggcgctgaagatgggggcaaccaaaaaagacttcgacaataccgtcgccattcacccaacggcggcagaagagttcgtgacaatgcgttaaatgttaaagggctaagagtagtgtgctcttagcccttaattacgtttccgctatcagttcagaagctgaagcagaaagcggatcagttccagcagcgcaattaacgcccctagaacgatgattgctttatcaatcacccgttttctccatgcgatggagtgagaatgcatccgcttactcatccactgcctgtcacggcgcatgtctcattgttagataagaactctctcactccggccagagcatcagttaacggcaccacccgtacttctgaccaggactttgaaagcgtttatgcgcattgccagagtgaaaatgcctcagagctaactggataatcatacagtacatgcaggttataaaaccagcacgtccttgcaatagtttcagtatggtattagcattgatgcgttagatgatggctatctcactccagtcagagccaccaactcagggctggaaagtaaaaaaccgacgcaaagtcggtttttttacatccggattcggacaaggcttaatatgacgatgacccagtgaaagtatataaatcgtcactgcgatatataccgaagtgctccctccgccagctgaagaaatcgctaattcttgcaatgttagccactggctaatagtattgagctgttagataagaactctctcactccagccagagccaccaactcagggctggaaagtaaaaaaccgacgcaaagtcggtttttttacgtcctgattcagacctcctttcaaatgaatagccaactcaaaattcacacctattaccttcctctgcacttacacattcgttaagtcatatatgtttttgacttatccgcttcgaagagagacactacctgcaacaatcaggagcgcaatatgagttttctgttacccatccaattgttcaaaattcttgctgatgaaacccgtctgggcatcgttttactgctcagcgaactgggagagttatgcgtctgcgatctctgcactgctctcgaccagagccagcccaagatctcccgccacctggcattgctgcgtgaaagcgggctattgctggaccgcaagcaaggtaagtgggttcattaccgcttaagtccgcatattccagcatgggcggcgaaaattattgatgaggcctggcgatgtgaacaggaaaaggttcaggcgattgtccgcaacctggctcgacaaaactgttccggggacagtaagaacatttgcagttaaaaatttagctaaacacatatgaattttcagatgtgttttatccgggaggcattatgttactggcaggcgctatctttgtcctgaccatcgtattggttatctggcagccgaaaggtttaggcatcggctggagtgcaacgctcggcgcagtactggcgttagttacgggcgtggtccatccgggtgatattccggtggtgtggaatatcgtctggaacgcgacggctgcgtttatcgccgtcattatcatcagcctgctgctggatgagtccggcttttttgaatgggcggcgctgcacgtcagtcgctggggtaatggtcgtggtcgcttgctgtttacctggattgtcctgctcggtgctgccgttgccgccctgtttgccaatgatggcgcggcgcttattttgacaccgattgtcatcgccatgctgctggctttagggttcagtaaaggcactacgctggcgttcgtgatggcggccggattcattgccgataccgccagcctgccgcttattgtctccaacctggtgaatatcgtttccgctgatttctttggcctcggctttcgcgaatacgccagcgtgatggtgccggtggatatcgccgcgattgttgccacgctggtgatgttacatctctattttcgcaaagatattccgcagaactacgatatggcgctgctgaaatctcccgcagaagcgatcaaagatcctgctacgttcaaaactggctgggttgttttactgcttctgctggtgggatttttcgtcctggaaccgctcggcattccggtgagcgccattgcagctgtgggcgcgctgatattatttgtcgtcgctaaacgcggtcatgcgattaatacgggtaaagtcctgcgcggtgccccctggcagattgtcatcttcagcctcggcatgtatctggtggtttatggcctgcgcaatgccggattaacggaatatctttctggcgtactcaacgtgctggcggataacggcctgtgggccgcgacgctcggcaccggattcctcaccgccttcctctcttctattatgaacaatatgccgacggtactggttggcgcgttgtccattgatggcagcacggcatctggcgttatcaaagaagcgatggtttatgccaatgtgattggctgcgatttgggaccgaaaattaccccaattggtagcctggctacgctactctggctgcacgtacttagccagaagaatatgactatcagctggggatattacttccgtacagggattatcatgaccctgcctgtgctgtttgtgacgctggctgcgctggcgctacgtctctctttcactttgtaatgagatactgatatgagcaacattaccatttatcacaacccggcctgcggcacgagccgtaatacgctggagatgatccgcaacagcggcacagaaccgactattatccattatctggaaactccgccaacgcgcgatgaactggtcaaactcattgccgatatggggatttccgtacgcgcgctgctgcgtaaaaacgtcgaaccgtatgaggagctgggccttgcggaagataaatttactgacgatcggttaatcgactttatgcttcagcacccgattctgattaatcgcccgattgtggtgacgccgctgggaactcgcctgtgccgccctagtgaagtggtgctggaaattctgccagatgcgcaaaaaggcgcattctccaaggaagatggcgagaaagtggttgatgaagcgggtaagcgcctgaaataaagcggcgatatcccccccacaggttgttagaaaagtgcgctttatttatgtcggatgcgacgctggcgcgtcttatccgacctacaaagttatgaaaattcgatgaatagtatgttatttgtaggcctgacaggcgtagcgcatcaggcgattttgctatttacacagtactccctgcgtgagattccaattatcgcgtccagcatggtgtatcagtgagctgcttagttatcagcgatacagcgcagtagtttaaagacgtactggattatgatttatcagtggtttacacaacaaattattaaataattataagataccttaacccattttattattacacatctaaaacatcacaaaaaaaatcacttcacacactatcagagaacataataactttttaaaatgagcgcattttgatagttgttaacgatttcctttacgatactatcactaccctttttttacacacaaatattaccgggtggagataaaagggaaatcaaaggtaattatatcaggaagatataacgcattacatttattgtgtgtagaagaaaatccattcctgttctaattatccaatttaaacatcttagcataaaacaaatgatgaataaggaattttatattgattattagcactttataatcattgaataaaaatagattttatgtacttttaaaacaatgcactatattatggggtgatggatattcatgtcacgccccaaaattaactgagttcacctaaacagaaaggatataaacatcagacaggtttacgttactatcaggcatatcacctcagaatcagatgaaaactataaagaaatatctattatggttttaatatttgttgataaggatagtaacatgaacatgacaaaaggtgcactcatcctcagccttagttttttgcttgccgcatgtagtagtattccgcaaaatatcaaaggcaataaccaacctgatattcaaaaaagttttgttgctgttcataaccagccggggttatatgttggtcaacaagcgcgctttggtgggaaggttatcaacgttatcaatggcaaaacggatacgttgttagaaatctctgtattaccgttggatagctatgcgaagcctgatattgaagccaactatcagggccgactgctcgccagacaaagcggcttccttgatccagtgaactatcgtaatcactttgttaccatcctcggcaccattcagggtgaacaacctggctttatcaataaagtcccgtataacttcctggaagtgaatatgcagggcatccaggtgtggcatttgagagaagtggttaataccacctataacctgtgggattacggctatggtgcattctggccggaaccgggctggggtgcgccttactacaccaatgcggtgagtcaggtaacacctgagctggtcaaataacaccaccgaaagatgcagatgctttctcagcatctgcatcatgcattacatcaaattaatacacagtaagctaactattattattataagccctgtcctgttaattacctttggcaaactgattataaagttaatgtccgcaccaggagtcggttatgtttcttataattaccagggatacgatgttcttcaccgcgatgaaaaacattctgagtaaaggtaatgtcgttcatatacagaacgaagaagagatcgacgtaatgttgcatcagaatgccttcgtcattattgatacattaatgaataatgtatttcattctaattttctcactcaaattgaacgattaaaacctgtccatgtcattattttctccccctttaatattaaacgctgcctggggaaagtgccggtgacctttgttccgcggactatcactatcattgattttgtcgcactcatcaatggcagttactgctctgtgcctgaagcggctgtgagtcttagccgcaagcaacatcaggttctgagctgcattgcgaatcaaatgacaacggaagatattctggagaaactgaaaataagcctaaaaacgttctactgccataaacacaatatcatgatgatcctcaatcttaagcggatcaatgagctggtacgccatcagcatattgattatctggtgtgaatttcaggcttacggtgagtctggctacgctgccacacagattagctaatactaacgcctttcacccctgccataccttttaataatcgcaacaggtcttctatgctcgttgtggcatgaagctggatatcaatggcgaccacttcatgatcttcattttcctgcaagctaactaaatcagtttttattttttgctgcttaaaccagtcgagcatacttaccgtattaccgttcactaatgtcagctgtaaatggtaatttttgttcatcaggcggaaggttaattgatggaagacttccagcaccaacaaggtcatcacactaccataaatacccagttcgtacataccgctgccaataaccatacctatggcggcggtcacccagatatccgctgccgtcgtcagacctacaatattttggttacgaacgagaatgttacctgcaccgataaacccgacgcccgtcaccacctgagcagcaatacggctggggtcgagtccgacgtgatctaaagacagcacgtcagcaaaaccatatttgctaacaatcataaacagggcgcttcccatgccaattaatacatgtgtgcgtaaccctgctcctttgccgcgcatttgcctttccatgccaatagcgccacaggcaattgccgcgagtataagacgtataataaattctgctgtcatataaaaatgcaaaaaggagcagcaagatggctcaacttgctactcctttttacttgcacctcattaattcggcaagtcattagatgcttgatttttgaaggtatacaaatttttctgcgggtttttcttacagtattcgatcactttaggaatttgagtgagatcggtttcatttaaagtaacggtatcgccacctttatatactgtttcttcatgcagcatccaccatgcaaccggggtcattgcttttggattcagatcaataaattcctggcaggtcatatctttagcggattcattggctgccaacgcagattgtgcgttcaccagactcaaagccgctacagcgcccataaaaataaacgctttacggagagaactaatattcattttgtaacccattcaatatagagattatatatgaacaggaggaatagctgcttttaaagaagatattccggcctgttcaatatgcaaggaagtacgatgtaacgcattcccggaattacatatctttcttaattttgtcccattcgcctttaactttatctttaaagttggcttgtttatcctgagtacaagcctgaacgatagctggggttacggttgcaataccctgaacatctaaaaccgcatcttctggtttatctttgttgttcagcgcttcagcaaaaccaactgcagttggctggaaggattcgtccacagccaggaaatcttcacaggtccaggagttgaccggttttttgttatcagctgctttttgcgcatccgctgcattgctcacaactggcagaagaagcagaccaccaagaataacgcctaatacttttttcatcgtaatatcctcaactataaagtgaaagagccgtcacgaatcaatttcgacactgaggttataacctggttttctgtatatgtcatgttgatggaaaatatcaaaatcagatatttttatttcaatacaatgagttacagatgcatcagatactgcaattaggaaatttttattaaatcgactgcattcttagacgcgtttttggcatagattgatagcaggggattttcttcttaattttatagggtggttctatgttatatatagataaggcaacaattttgaagtttgatctggagatgcttaaaaaacatcgcagagcaatccagtttattgccgtgctgctgtttatcgtcgggttgctgtgtatcagtttcccgttcgtctctggcgatattttaagcacagtagtgggtgcattattaatctgcagcggtattgcgcttattgtcgggttattcagcaaccgcagtcataatttctggccggtattatccggtttcctcgtcgcagtcgcctatttattgatcggctatttcttcatccgcgcaccggagctgggcatttttgccattgcggcatttattgccggtttgttctgtgttgcaggggttattcgcctgatgagttggtatcgtcagcgtagtatgaaaggcagctggctacagctcgttattggtgtgctggatatcgtcattgcctggatattccttggtgcaacgccgatggtgtctgtaacgctggtttccacactggtgggaattgaactgatatttagcgccgccagcctgttcagcttcgccagtttgttcgttaagcagcaataattaccccggttgtcacccggatcatagtcacttgatgtgactatgatccgattaatactctctccgctacgcagtgttgtagatcaattgcgcactatcattgaaataattacctgctagtgattatttcaacctactgaatttcatctaatttttttcactctatggcaaattagccatttcaaacattatcatggctgatattttccgtagtcaggtttaatgttttaaaagtgctgtgggaaagtgaacaaagagttccgtaagcgttgatgctatgggcggttaaataagtaatccgggttcatttttttgcaactggcgttgattacattgcataaatatccgtgtctccagacgctatataaaaacctgaagacatgaatgcgttatttactcaggtaatttcaatgcgttaaaagaaagctggcaatccaattgccagcttaagtcgaaacaaggagactcgatatttaaatcggattacattttaactttagtaatattcttcagagatcacaaactggttattgataacttattcttgggcagtaatccgcaaacgttaactttttgtttgctatttacaagctgataacaaccaggaatcttacttaggatcaatatatggagtgcgtgatggataaatctgaagtattgattagtgttaatagacgtattagttcacgaagggtaaagttcttataggcgtttactatattgaacaacgattcggacaaggatgtaaataatgaaaaggatgacatattcgaaacgataacggctaaggagcaagttatgatttttctcatgacgaaagattcttttcttttacagggcttttggcagttgaaagataatcacgaaatgataaaaatcaattccctgagtgagatcaaaaaagtaggcaataaacccttcaaggttatcattgatacctatcacaatcatatccttgatgaagaagcgattaaatttctggagaaattagatgccgagagaattattgttttggcaccttatcacatcagtaaactaaaagctaaagcgcctatttattttgttagccgcaaagaaagtatcaaaaatcttcttgagattacttatggtaaacacttgccccataagaatagtcaattatgttttagtcataatcagttcaaaattatgcaactgattctgaaaaataaaaatgaaagcaatatcacgagcacgctcaatattagccaacaaacattaaagattcagaaattcaacattatgtacaagctgaaactaagacgtatgagcgacatcgtcaccctgggtatcacatcttatttttaatcaggacataagcaactgaaattgatggctggcatgacgagggatgcagatgctgatttcattacccccggtgattactaaaggagaggctaaaacgactttattcccctggtatgtgtatccaccagtagaacccttcgttgcccgaatgctggcaggaactgttggcagaacggcaacattttttttgtcgttgacctcaccatgtcgatcactgtgcctgtatcccaccttactggctgacaaccccactatgccgctggtctgtaaatccctcatatctctcctcgcgcgcaatttaaagaaccgttatttctcaagaattttcagggactaaaatgaacagaagaagaaagctgttaataccgttgttattctgcggcgcgatgctcaccgcctgcgatgacaaaagcgcggaaaacgccgccgccatgacgcctgaggtcggtgtcgtcacactctcccccggtagcgtcaatgtgttgagcgaattgcccggtagaaccgttccttatgaagttgccgagatacgtccccaggtgggcggtattatcattaaacgcaactttatcgaaggcgataaagtgaaccagggcgatagcctgtatcagattgatcctgcacctttacaggccgagctaaactccgccaaaggcagcctggcgaaagcgctctctaccgccagcaatgcccgcatcacctttaaccgccaggcaagcttgctgaagaccaactacgttagccgtcaggattacgacaccgcgcgcacccagttgaatgaagcagaagccaatgtcaccgtcgccaaagcggctgttgaacaggcgacgatcaatctgcaatacgcgaatgtcaccagcccgattacgggcgtcagcgggaaaagcagcgtgaccgtcggcgcactcgttaccgctaatcaggcagatagcctggttaccgtacaacgtctggacccgatttatgtcgatctcacgcagagcgtgcaagatttcttacgcatgaaagaagaggtcgccagtgggcaaatcaaacaggttcagggcagtacgccagtacagctcaatctggaaaatggtaaacgctacagccagaccggcacgctgaaattctccgacccgacagtggatgaaaccacgggctccgtgacgttacgggcgattttccccaacccaaatggtgacttgctgcctggcatgtacgtcacggcattagtggatgaaggtagccgccagaatgtattactggtgccgcaggaaggcgtcacccacaacgcccagggtaaagcaacggcgctcattctggataaagacgatgtcgtgcagctacgcgaaattgaagccagcaaagccatcggcgaccagtgggtcgtcacctctggcttgcaggctggcgatcgggtgatcgtttccggtttgcaacgcattcgtccgggtatcaaagcacgagcaatttcctccagccaggaaaacgccagcaccgaaagcaaacaataacgttgcaggcttaaggggactttcatggctaactattttattgatcgcccggtttttgcctgggtacttgccattattatgatgcttgcaggtggtctggcgatcatgaacttaccggttgcgcagtatccgcagattgcgccaccgaccattaccgtcagcgctacctatccaggtgccgatgcgcaaacggtagaagacagcgtcactcaggtgattgagcaaaatatgaatgggcttgatggcctgatgtacatgtctagtaccagtgatgcggcgggcaatgcctctatcactctgaccttcgagactgggacatctcctgatatcgcacaggttcaagtgcaaaataaactgcaactcgctatgcctagtttacctgaagcagtgcagcagcaggggattagcgtcgataagagcagcagtaatatcctgatggtagcggcgtttatttctgataacggcagcctcaaccagtacgatatcgcggactatgtagcgtctaatatcaaagacccgctaagccgtaccgcgggcgttggtagcgtacaactctttggttccgagtatgccatgcgtatctggctggacccgcaaaaactcaataaatataacctggtaccttccgatgttatttcccagattaaggtgcaaaacaaccagatttccggtggtcaactgggtggcatgccacaggcggcagaccagcagctaaacgccagcatcattgtgcagacgcgtctgcaaacgccggaagaatttggcaaaatcctgttgaaagttcagcaagatggtagccaagtgctgctgcgtgatgtcgctcgcgtcgaacttggggcggaagattattccaccgtggcacgctataacggcaaacctgctgccgggatcgccatcaaactggctgccggagcaaacgccctggataccagccgggcagtcaaagaggaactgaaccgcttaagtgcctatttcccggcaagtctgaagacggtttatccttacgacaccacgccgtttatcgaaatttctattcaggaagttttcaaaacactggttgaggctatcatcctagtcttcctggtcatgtatctgtttttgcagaatttccgtgccacaatcatcccgacgattgccgtaccggtggttattctcgggacgtttgcgatcttgagcgcggtcggtttcaccatcaacacgttgactatgttcgggatggtgctggcgatagggttactggtggatgacgccatcgtggtggtggagaacgtcgagcgtgtcattgcggaagataagctaccgccgaaggaagcgacgcataaaagcatggggcagatccaacgtgcgctggtcggtattgccgttgttctttccgcagtgtttatgccgatggcctttatgagcggtgcaaccggggagatctaccgccagttctccatcacgctgatctcctccatgctgcttagtgtatttgtggcaatgagcctgacccctgccctgtgcgccaccattctgaaagccgcgccggaaggcggtcacaaacctaacgccctgttcgcacgcttcaacacgctgtttgaaaaaagtactcaacactataccgatagcacccgcagcctgttgcgttgtaccggtcgctacatggtggtctacctgctgatttgcgccgggatggcggtgctgttcctgcgcacgccgacctctttcttaccagaagaggatcagggggtatttatgaccaccgcgcagttaccttccggtgccaccatggttaacaccacgaaagtgctgcaacaggtgacggattattatctgactaaagagaaagataatgtccagagcgtgtttaccgttggcggctttggcttcagcggtcaggggcaaaacaacggcctggcgtttatcagtctcaagccgtggtctgaacgtgtcggtgaggaaaacagcgttaccgcgatcattcagcgggcaatgattgcgttaagcagtatcaataaagccgtcgtcttcccgttcaacttacccgcggtggctgaactgggtaccgcgagtggttttgatatggaactgctggacaacggtaacctggggcacgaaaaactaacccaggcgcgaaacgagctgttaagtctggcagcgcaaagtccgaatcaggtcaccggggtacgcccgaacggcctggaagatacgccgatgttcaaagtgaacgtcaacgctgcgaaagctgaagcgatgggcgtggcgctgtctgatatcaaccagacaatttccaccgccttcggcagcagctacgtgaacgacttcctcaaccaggggcgggtgaaaaaagtgtatgtccaggcaggcacgccgttccgtatgttgccggataacatcaaccaatggtatgtacgcaacgcctctggcacgatggcaccgctttctgcctacagctctaccgaatggacctatggtagtccgcgactggaacgctacaacggcatcccgagtatggagattttaggtgaagcggcggccgggaaaagtaccggtgacgccatgaaatttatggcagacctggtcgctaaacttccggcaggcgtcggctacagttggaccggactaagctatcaggaagcgttatccagtaatcaggctcctgcgctgtatgcgattagtctggtcgtggtgttcctcgccctcgccgcactctatgagagctggagtattccgttcagcgtgatgttggttgttccgttaggcgtcgttggcgcattactggccaccgatctgcgcggcttaagtaatgacgtctacttccaggttggtttgctgaccaccatcgggctttccgccaaaaacgccatcctgattgtcgaatttgccgttgagatgatgcagaaagaagggaaaacgccgatagaggcaatcatcgaagcggcgcggatgcgtttacgcccaatcctgatgacctctctggcctttattctcggcgtgctgccgctggttatcagtcatggtgccggttctggcgcgcaaaacgcggtaggtaccggcgtgatgggcgggatgtttgccgcaacagtgctggcaatttacttcgttccggtctttttcgttgtagtggaacatctctttgcccgctttaaaaaagcgtaacgtgtaaatgagagtaaggttgaacatgaaggttcagccttactctttcctgctaaccattcaccactcaacaaccagctaaccgtcaggaataccaggcttagtacacagcactgaaagtagaaaccactccagccattcgtcatcaatttgaacaacacaatactgacccacattcccgtaatcgtatgaattgtcagcttaataatcccaaacatgccgagtcttttcctcctgaaaataccgataccgcctggcaaactgcgaaagagaactagccggtagcccggcagaaatcatcagggaagagtttcacatgaagcaggtgtgagatcctgaccaatattcaaatgcgaaatatgtcaggaaaaggtacctgggctatgttgcgcaaactgatgtggcgttacaccataatattgtcgaaatgtgtttataaagtagcttgtactgctatagccacatttttccgcaatagtatgcagaggaatttgacgtaactcgagtaatcgtctggccatgctcatcctggaggcgagtaatattttactgaaacaggtattttcatcctgcaacttttttttgattagactctcgctggtatacattctttccgcgatatcgcgcagataccaacgtttggcgatatcaaagctaataaggcgttcaacttttccactaacagtgctgatgctattgaaaagtaaggggatcagttctttcttatgagaaaacatgcttaaacaggaaaggtagagcatattgctcagtatcggactatttaccccggattcattgaagctatcaaaaatcgccgtcaccagcggcatggggggactctggttaattaacaaacggtctttgctgtgtaaccctaaattgcgtggtagctgacgaatattttgtaagtaatggcaaactgtcagctcatcgatatccagtcgtcgcgtatccggactacaaaacgcaaaatcgtctgccaaatttttctccagcagcagaatactctcgttatgcaggcttattttttgctgttcatgataaatatcgaaactacgacgaatgaggatcacgctgcagacatgagtcatgattatcccttatatttcatactgcgattatttcaatttcagtatactaatgaaatgatgccagactgtttcttagcgcaaaaactgccagatttggtaggaccaaaatttatccacaaagtagttttgcataacagttaattgataataagtaaatgcagcacgaatatattttcgcacagcgtatagcttatgtttataaaaaaatggctgatcttatttccagtaaaagttatatttaacttactgagagcacaaagtttcccgtgccaacagggagtgttataacggtttattagtctggagacggcagactatcctcttcccggtcccctatgccgggttttttttatgtctgagtaaaactttataatcttattccttccgcagaacggtcagtgccgtaaaaattcccttgcgcaacaatacttgccgcgctgtcacggttgctcaatctctgcgcgcttcgctcctgatactctgtgggcgtcatcccataataatttcgaaagacgtaaatgaaatagctcacgctgtgatatccacaggatactgcaactcgcttaatactaaaaccatgtataacaataagttgcaaagcacgttgcattctacactcagtaagcaactgactataacttgtctcttcttcgcgcaattttttctttaacagacttggactcatcaacagctcgctggcgattcgggctagtgtccactcatgggcgatattattattgataaccgtacaaactcgtgttcgcatgttcggttgtaaaacgttcagaagcagcggtataaagtgctcatcctcaagaaaaacagataacaacgcaaagattaatgctcttttacgtagcatttctgcatagcgaagattcttattctggcttagttgcgcaacttcctgaaaaacaggaatatctctactacagtgatgaacgagtaaactagaaacttttttatgtgcatgaagatttaatgcctcctccttgagcatcgggagaaataaactaagcgtgtccctactcacgaatacaaaattttcaacacacttatctactcgaatttggcttgcatccgcaaaaaccaggtcaccgccattaaaatagcgatattcaccattaaccatggtgagaatatatttatgtcttgcatacgcaattagacaattcccatgtagactttgcatagttgacttaatattacataaacatattactgtttattaatgtagcacgccgccctcttaagtcaaattgattgataaataaatttaaacgaagcgggagaacaggatgataatgtgtgatgttctacgggcaggatgactggatttataatacaaaaacgtgtttaagaacacagggaaattaatagtaagcaaataatcccttttcgtgacattaaaggtaatcgctacatttaataaacattcatataacatatatcttatcaacacgatgaatagacagccaatatattattgcgattaataagcaaccgaatgcccagctgtttttttaaaggctgggcattcggtttttacaacgttatgttatcaggtgtgtttaaagctgttctgctgggcaataccctgcagtttcgggtgatcgctgagatatttcagggaggctttgtagtcttccagcaacagttcagcaaagtccatttcgaagccgcgacgacacataatgcgcatcaccacgatgtcggtggcttcaccgccgagagtgaaggccggaacctgccagccgcgcagacgcagacgttcagagaggtcgtacagggtgtatcccggatcttcaccatctttcagtttgaagcaaaccgccgggatgccttcgtccgggcgacccgtacagatgaactcatacggccccagtttggcgatttcatccgccagataagcggcaacctggtaagaggcgttctgtactttggtatagccttcacgaccgaggcgcaggaattcatagtactgtgcaattacctgacccgccgggcgggagaagttgatggcaaaagtaccaatttgaccacccaggtagtcaacgttgaacaccagttcctgcggcagcgcttcttcgtcacgccagataacccagccgcagcccagcggagccagaccgaatttatggccactagcactgatgcttttcacacgcggcaggcggaagtcccagacgatatccggggcgacgaacggtgccaggaagccaccgctggcagcgtcgatgtgcatgtcgatgtcgataccggtgtcggcctggaatttatccagcgcatcgtgcagcggttgtgggaactcatagttaccggtgtaggtcacgccgaaagtcggcaccacgccgatggtgttttcgtcacaggcttcaatcatgcgtttcgggtccataaacaactgaccggggcgcatagggatctcacgcagctccacatcccagtagcgggcgaatttatgccagcagatttgtaccggaccgcacaccaggtttggtttatccgttggtttgcctgcagcttccatacgcttgcgccaacgccatttcatcgccatcccgccgagcatacaggcctcggaagaaccaatggtgttggtgccaacggcctgaccatttttcggcgcaggcgcatgccacagatcggcaaccatatttacgcaacgcaggtcgatggctgcggattgcggatattcttctttgtcgatccagtttttattgatgctcaaatccatcaatttatggacgttttcgtcgtcccaggtctggcagaaagtggccaggttctgacgagcgttgccatcaagatataattcatcattgataatctgaaatgcgacatcatcgcgcatttcgtgcagcggaaatcgtttactctccgcgatagtagaaatggcctttgcgccaaaacgactatcgagtagttcactgcggaaatccgttaacagcttctggtccatttcgaactccttaaatttatttgaaggcaataaaaaagtaggatttatccgcaatggaagcaaggcattacaggcttaatttaaataacaaaatcctaagcagaaaaacgactttttataatataaacatttaacatgataatattaaaaacagactttattatcgtaataaaaatcgcccaaacattgctgttcgggcgatcaaattaattattgtttatcctgcatatacggcgtgtacaccccgttcagactgtgcaggaaagctacgatatcatccacatcctcctgcggcagctctttgcctacctgatagcgcagcatcagtttcaccgccccgtccagcgtcggcacgtcaccgcgatggaagtacggtgccgttaaagcaacgttacgtaaaccgggtactttctgacgcaatttatcacgctcttctttagtcacattcatacgaccaatatccgccgccgtaatttccccaaagttaaagtcttttttcagccccaacggttcaaaggaacgtccgccgagaataataccaccatgacaagttgcacatttattatctttaaataattgatagccttttttctgttgcgccgtcagcgcattttcatctccgcgcaaccatttatcaaatggggaatccggcgtaattaatgttttctcaaattcagcaatggcatcagtaatattttcgccactgaaaccttgcggatagacttcgaggaactgcgttttaagctgcggatctttttccagcttagcaataatttcgtcccaggatttgctcgccatttcaatcgggttcaacggcggtccaccagcctgatcctgcaatgttgccgcacgaccatcccagaactgctcaacgttaaatacactgttaaataccgtcggcgcgttaatcggcccaactgcgccaccaacaccaatgcttgtttttctgccatcgacgccccccgcattcaacgcatggcaatgagcgcaactaatggtgctatcagcgcttaaacggggatcgtgatacagcgcaaaacccaacgccactttttgcgcatcggtaggcagtttttgcgggatgggctgcaccggttcattgcgatgttccggagcagtatcattgctggcgtaatattccgcgcgctgttttgcaatccaggccagtatttccgcccgctcttcatcactcaccttacccgcccagtgtagcgcggtataacgcgttggtggcatagtttcatactgcatcacccattcaatcttattcaaatcgctttggctaacgggtttatcagccagcagtgccgcacgcacggcctcaaggttaaaagatttatatccaagcttaatgtcgtaatccatcaactgtttcgcgccaggaatataataataggcgggtaattctgcgctaggcgtgtggcaatagtcgcatcctttttcgcggagaaagcctaaaaccttattattttcactgacagcagatgcctgaacatcggcctgtttactgcgtttattatcgtggtaccacacataaccagataaccctaaatagcaaatcgcgacgccagccaggccgatcgcggtaatacgactgaccattttcattattcttccctcacggtggtgagttattgtgacccagaaaattttccagaatgctgcaaacgtctctgcgagacaaagccatcataaaaaacagggagatacgctttttgataggaatcaatcaattacatgaatataaactatcaataagatagcctgtgcctattacccagatcaggaatggcatatcatgattgcggcgagagcaggattgaatgttctgaaaatgaaaaacaacaccaaatcggtatttttataaattccattgatattagtgcgttatattttttgacaggttaataaacgtgatccaccgcacgctttgtcgcccaccaggcggagcgaatgactacccttaaagaaaagccgataattagcgacgaatttcggaggttggatccttatgctcaatcagaaaattcaaaaccctaatccagacgaactgatgatcgaagtcgatctctgctatgagctggacccgtatgaattaaaactggatgagatgatcgaggcagaaccggaacccgagatgattgaagggctgcctgcctctgatgcgctgacgcctgccgatcgctatctcgaactgttcgagcatgttcagagcgcgaaaattttccccgacagtaaaacctttcccgactgcgcacctaaaatggacccgctggatatcttaatccgctaccgtaaagtgcgccgtcatcgtgattttgacttgcgcaagtttgttgaaaaccacttctggctgccggaggtctactccagcgagtatgtaagcgacccgcaaaattccctgaaagagcatatcgaccagctgtggccggtgctaacccgcgaaccacaggatcacattccgtggtcttctctgctggcgctgccgcagagttatattgtcccgggcggccgttttagcgaaacctactattgggattcctatttcaccatgctggggctggcggaaagtggtcgggaagatttgctgaaatgcatggccgataacttcgcctggatgatcgaaaactacggtcacatccccaacggcaaccgcacctattatttgagccgcagccaaccaccggtttttgcgctgatggtggagttgtttgaagaagatggtgtacgcggtgcgcgccgctatctcgaccaccttaaaatggaatatgccttctggatggacggtgcagaaagcttaatccctaatcaggcctatcgccatgttgtgcggatgccggacggaagcctgctcaaccgttactgggacgatcgcgacacgccgcgtgacgaatcctggcttgaggacgttgaaaccgcgaaacattctggtcgcccgcccaacgaggtgtaccgcgatttacgcgcgggggcggcctccggttgggattactcttcccgttggctgcgtgatactggtcgtctggcgagcattcgtaccacccagttcatccccatcgatctgaatgccttcctgtttaaactggagagcgccatcgccaacatcagcgcgctgaaaggcgagaaagagacagaagcactgttccgccagaaagccagtgcccgtcgcgatgcggtaaaccgttacctctgggatgatgaaaacggcatctaccgcgattacgactggcgacgcgaacaactggcgctgttttccgctgccgccattgtgccactctatgtcggtatggcgaaccatgaacaggccgatcgtctggcaaacgccgtgcgcagtcggttactgacacctggcgggattctggcaagcgagtacgaaaccggtgaacagtgggataaacccaacggctgggcaccgttacaatggatggcgattcagggatttaaaatgtacggcgatgaccttctgggtgatgaaatcgcgcgaagctggctgaagacggtgaatcagttctatctggaacagcacaaactgatcgaaaaataccatattgccgatggtgttccccgcgaaggcggcggtggcgagtatccgttgcaggatgggtttggctggactaacggtgtggtacgccgtttaattggtttgtacggcgaaccataatatttttacagccagccgctaacttcctgctggctgtaaaattatcctcttcaggaggagatatttaacatcattgccgcctgggtgcgatttttcacttccagacggcgatacagggattccagatgcgcttttaccgttccggtactgatattcagcgctctgccgatctccttattactttcgcccgccgctaacatggttaaaatctcccgctggcgggcgcttaagcttttgagatctttaatgtccttttccggcgtcgtccgccagtctccaggcagaaacatcatccccatcgccgcactatttaccgccaacgcaaatgtctcgacggtactatcacgaggcacaatggccagcacattaaaatggataacttcctgtaaccaccgtttattgcaatccgtcgccgtaattaacaccttaacctcaggaaattgcaccacggttttttgcagcaaccagtagcaaaactcaccatcctgatcgccatcgagcataactaaggcttcagggtaactttccagcttttgccataactcgtctgcctgactggccccctgaatactcactcctggaatacgctgctgtaaactgattttcattccatgaataaatatactctgcctgtcaaacatgactatttgcataactgaatctccacctgaatacgttaaaaagacttaagtagtggaagggtattacccgcgagaaaaaataagaattcgccatttggcggtggccattctacagagatgacgtgtagaaaatagttaccgatataaatagttacagctaaacgcctgaaattacatgtcgagggcactatttaaaacaattttgaggatttccttatattggtggttagtacgcatgcaattaaaaatgaaattccgcgaccacaagccaaaataacaaacggcaaggagacaaaaataagcacaaatagccaacacgtcctctgttcactttaaagggaatcgctgaaaaatacgctctgtttaaggggattcacctttctcagaaagctattccgcccttttcctgctgagaaatcgccacattcggcatgacaacattgtgaaacccggcattagatgttagaaaaaacaataaacaatgcgatatgcgcgttactgtttcgctgtgaacaacaaagcgtcaaagaaatggataaaattcacgcaatgcagttgttcatcaaagtcgcggagctggaaagtttttcccgcgcagcggatttctttgctttgccaaagggaagtgttagccgccagatacaggcactggaacatcaacttggcacccagcttctccagcgcaccacgcgacgggtcaaactcacgccagaaggcatgacctattatcaacgagcaaaagatgtgttgagtaatctcagcgaactggacggtctgtttcaacaggatgccaccagtatcagcggtaaattacgcatcgacatcccgccaggaatcgcgaaaagcctgttactgccgcgcctgagcgaatttctctatctgcatccgggaattgagctggaactgagtagccatgaccgtccggtagatattcttcatgatggttttgattgcgtgatacgcactggcgcgttaccggaagatggcgttatcgcccgtcccctcggcaaactgaccatggtcaactgtgccagtccgcactatctgacgcgctttggttatccgcaaagccccgatgatctgactagtcacgcaatagtgcgttatacaccgcacctgggtgtacatccgttaggttttgaggttgccagcgttaatggcgtccagtggtttaagtctggcggcatgttgacggtaaacagtagcgaaaactatctcaccgccggtcttgccggtctggggattattcagatcccgcgcattgccgtgcgcgaagccctgcgtgccgggcggcttattgaagtattacctggctaccgtgccgagccgctctcccttagcctggtttatccgcagcgtcgggagctttcccggcgtgtaaacctgtttatgcagtggctggctggcgtaatgaaagagtacctggactgaccgactatactttttaagaatgaccacgacagaaggacaaaagagcggatgacgcaggaaaacgagatcaaacgtcccatccaggatctggagcacgagccgattaagccgttggataatagcgagaaaggcagcaaagttagccaggcgctggaaaccgtcaccaccactgccgaaaaagtccaacgccaaccggttattgcgcacctgattcgcgcgacagaacgctttaacgatcggctgggtaaccagtttggtgcggctatcacctatttcagttttttgagcatgataccaattttgatggtgagctttgccgcagggggctttgtgctggcctcccatccgatgttgctacaggatatcttcgacaaaattctgcaaaacatcagcgatccgacgctagccgccacgttgaaaaacaccatcaacaccgccgttcagcagcgtacgactgtagggcttgtcggcctggcggtggcactttattccggcatcaactggatgggtaacctgcgtgaagcgattcgtgcccagagccgcgatgtctgggaacgcagcccgcaagatcaggagaagttctgggtaaaatatctgcgagattttattagcctgattggtttgttgattgcgctgattgtgacgcttagcatcaccagcgttgccggtagcgcgcagcaaatgattattagcgccctgcacctgaacagcattgagtggctgaaaccgacgtggcgattgattggcctggcgatttccatcttcgccaactatctgcttttcttctggatcttctggcggttgccgcgccaccgtccgcgcaaaaaagccctgattcgcggaacatttctggctgctattggttttgaagtgattaaaatcgtgatgacctacaccctgccaagcttgatgaaatccccctctggcgcagcatttggttccgtgctggggctgatggcatttttctacttcttcgcccgtttgacgctgttttgcgcggcgtggattgccaccgccgaatataaagacgacccgcgaatgccggggaaaacgcagccttaaaataggccggatgcggcgtaaacgccttatccggcatacgattttattcggcctggctccccgtaggccggataagatgcgccagcatcgcatccggctataatgcgcacataacctcttgaaactcgtccccagagcctcttcagccatctatttgggagcaaacaatttcattccaactcataaccccagcatataaatccagttggtaacttttatttaacctgaaaccagttttatccactatttataaaattatgtgaagcatttcatagaagaaaaatcactggcctaaacattatcccctttttgcctgatttttgaccatttccgcgatttgttacacattgaaatatcacttttgctgtgcgtaatatggctattcgttagccaaaaaataagaaaagattatgcaagcaacagccacaacactcgaccacgagcaagaatacacgccgatcaacagccgtaataaagtccttgtcgcctctctcattggcacagccattgagttcttcgacttttacatttacgccactgcggccgttattgtgtttccgcatatcttcttcccgcagggcgatcctacggcagcaacgctacagagcctcgccaccttcgccatcgccttcgtcgcgcgccccattggctctgccgtttttggtcattttggcgatcgcgttgggcgtaaagcgacgctggtcgccagcttgctaacgatggggattagcaccgtggtgattggtctgctgccgggctatgccacgattggtattttcgccccgctgctgctggcgctggctcgatttggtcagggtctgggcttaggcggtgaatggggcggcgcggcgctgctggcgactgaaaacgccccaccgcgcaaacgtgcactgtatggctcctttccgcagctgggcgcaccgattggcttcttctttgccaatggcactttcttgctgctttcctggctactgaccgacgagcagtttatgagctggggctggcgtgtgccatttatcttcagcgcggtgctggtcattatcggcctgtatgttcgcgtgagcctgcatgagagcccggtgtttgagaaagtcgctaaagcgaaaaaacaggtgaagatcccgctgggtacgctgctgaccaaacatgttcgcgtaaccgtactgggtacgttcattatgctggcaacctatacgctgttttacatcatgacggtctactctatgacctttagtaccgccgccgcgccagttgggcttggcctgccgcgtaacgaagtgttgtggatgttgatgatggcagttattggttttggcgtgatggtgccagtcgctggattactggctgatgcctttggtcgccgtaaaagcatggtaatcatcaccacgctgatcatcctgttcgcgctgttcgcctttaacccactgctcggttctggcaacccgattctggtttttgccttcctgctgctggggttaagtctgatgggtctgaccttcgggccaatgggtgcgctgttaccagagctgtttccgacagaagtgcgttacaccggagcaagcttctcttacaacgtagcgagcattctcggggcttccgttgcgccatatatcgcagcctggttgcagactaactacgggctaggtgcggtggggttatatctggcggcgatggctggcttgacgttaatcgccctgctgctgacccatgagacgcgacatcagagcttgtaataagagtgaaaagcctgatgcgctacgcttatcaggcctgaatttccatacaatatattgaattcgcaaggatttgtaggccggataaggcgttcacgccgcatccggcatgaacaaagcacactttgccaacaatctaaatctgtttaattgccggatgtcagacatccggcaattatcatcacttcttcatctggctcaaaatcgtccgacactgattagcctccccttcggaaggactgatcagtgccagtaacgccgccgccggtgttaccagcgttgccagtgccgcagcaacagcaccacgggcaatcagcggtccggctttcaccccagcctgcggatttttaaacgtcccccgcacatacagcgggctacgcagtgtgataatccgaattcctttactctccggatcaatagtcaaatccagctgttcgctagcaaaacttgccgtgccggtaacattaatcaacgcgttctcagtatcgaaagcaaaaatctgcgggcgcgccacgccgttggcaatattcagattcgccgccgcgcagttcacccgcacctcatcatcaccaaatatcgcaccgacaatgtagttgccgacattcagcccaacaatctccatcaggttgcggctcaccagcccgtcattcatcaacagtttcaggttgccgttactgttgcctaaaagtgccgccacgctgttaccgctaccgcgtagttccgcgtcaccgttcatttcccccagcgtcttctgcatcagttccacatcgggcatcagttctttcagtttcagtcgacgagcctgaatatctgcccgcccctgcatcggctttttatcgccttccagatgaatattcgccgcaatgctgccgcccgccatgccaaatttcagcggttgcaggcgcaggtcagcatttttgaggatgatatgagtagaaagatcgctaatcggcaggctactgccatgctcaatgcgccgccctttgaagcgaacatcggcatccataacgtcccatttatcggtttcgaagcggtcataaggcagcactttgcccgcaggctgaacgcttttttcgcccttcttctgttcagaccgtttgctcttttctgcccctttcccggaatcaacgccaatcaacggtcccaggtccgccagccgcaattgccggctctcgacatcaccttccagttttggtcgtggctttccggtggtgtagaccagagaaccgtggatatcgctatcaccaattcgcccattaaaaccgcgataatcaaagacgctgcttttttcagtgtcgattttcgctaccagccgaccatccgtttcaaacggcggggtatcgggcagcagaacgcccgtcagttcatagagatcacccagactatcgccagaaaatttaagccgtaaatcgacaccgcccatcttcattgggtcattcacgacgccatcaaaagcaacacgggtgttaccagagcggaaatcagcctgtaccggaaacggcgtcccttcgccacgcagcgccagcataccgcctatttttcccgtacccgtgagcggttcaccgttatatcgtccctgcgccttcaggccaaaaacgtaatcgcccaccttttctttatccgctttacctttgcttccagtaacttcgctgaacggcagcggcttgcctaagggatcaacaaaaatctccagatccgctttgcttactttgtcatcaatggcgatccgcccttgatcgaaaagaatattatccagccgaaagctccatgcgctcggctttgcattcgcgtctttgttatcatcgttggcaagattaaacgtccagttattgttcttttcagagaggcgaatcaggcgcgcgtcgggcttttcgagcttgatccacggcagccagaccgttttggtcagcagcgccagcggggccagcgttgcctctacgcgtggcaaatgcaccatcgtgacttcgggaatatccggtggattgccaagaatgatgtcttccgcgtgtacatggggccacggcacccagctgcgccagccagtttcttgtttttgccgctcccacaccacgcccagatcgccacggatagcgaacggacgattcaactccgcagagactttctggttgatagtcggtttgagtcgattccagtcaaaagttgcaatcaaaatgatcgccacgacaatcaacaacaagaaagccccactaatcgcagcggttattttgcctgccttgctcatcgttcgcttcctcatattcttcctgtgccagtcctaaagatagtccagccaggcggaaaatgaggcagcttatagcgccagaaccgccgtattcagcgtttctatcggtgccgggcgactaagaaaccagccttgtgcggcgaatgcggggctgttctgaacatcacgccactcttccggcgtttctacgccctcgacaatcaccccgcgacaatagcgattcattagatgtaaaagctgagaaaagagtgtgcgtccttccgggctctgacgcagcatcacaaacagttctcgcgcgattttgatgtagtcataacgcacttcacttagcgcagagaaatttgccatcccggtaccaaaatcatccagccacagcgggccaaattcacacatgctggcaaaggtactatctttcggcagacggatatgctccaccagttcgaaacgcagccagggaagacgctcaatctggcgcaggatttttggttgctgacgcagggcgatgagcgtagggccatcaatattgacgcttgccagcaggccgtgctctataaagaagtcggctttttgcgccagcaaatcaatctgctctttcacaacctccatccgatggctgacggtgatttcagtaaaatagcgatccggcggcaggcgttggctagggttcaagggatgcgtgaccaccgttaatagctccacggccattaaccgcccgcatgtttgatagatcggctgccaggtgtaagcacgctcacactgcaaccaaaaacgccgttcctgcaagctctcgatgcttgcttcagggttgcttattcgctggataacctgccttatcatcaaagatgtcctgtgtttaaaagtgatgctgcccggactcgacaaagattatcggcgcgtaagggcagaactttaccgcctggccggggtaaatttcctcactccacaacggaatctttcaggaatacgttctggctcaaaaaaataatggaacactgttttaatatggttgaccagcaaaccaccacagcgcaaactaacgctaattttttacagatcaggttcacgactatgtccaaaaagattgccgtgattggcgaatgcatgattgagctttccgagaaaggcgcggacgttaagcgcggtttcggcggcgataccctgaacacttccgtctatatcgcccgtcaggtcgatcctgcggcattaaccgttcattacgtaacggcgctgggaacggacagttttagccagcagatgctggacgcctggcacggcgagaacgttgatacttccctgacccaacggatggaaaaccgtctgccgggcctttactacattgaaaccgacagcaccggcgagcgtacgttctactactggcggaacgaagccgccgccaaattctggctggagagtgagcagtctgcggcgatttgcgaagagctggcgaatttcgattatctctacctgagcgggattagcctggcgatcttaagcccgaccagccgcgaaaagctgctttccctgctgcgcgaatgccgcgccaacggcggaaaagtgattttcgacaataactatcgtccgcgcctgtgggccagcaaagaagagacacagcaggtgtaccaacaaatgctggaatgcacggatatcgccttcctgacgctggacgacgaagacgcgctgtggggtcaacagccggtggaagacgtcattgcgcgcacccataacgcgggcgtgaaagaagtggtggtgaaacgcggggcggattcttgcctggtgtccattgctggcgaagggttagtggatgttccggcggtgaaactgccgaaagaaaaagtgatcgataccaccgcagctggcgactctttcagtgccggttatctggcggtacgtctgacaggcggcagcgcggaagccgcggcgaaacgtgggcacctgaccgcaagtaccgttattcagtatcgcggcgcgattatcccgcgtgaggcgatgccagcgtaaacgcagcatatgcaaaaggctggataaagtgttacccctctatccagctcatccataaatacctgatggttgtgctaactcatcaccatcaggcattactgtgcaggtggaatatccgtcacttcaggatgtacgtcatccgtggcgacagaggtggtcgcagcggcggtagatggggccatgatttgatcccagaccgcctgcaacgctttcatgttaaattccggctcgcctttcggctgcagcagtattaacgccatatcattgctcaactgttgacgcagatcctgatttaacatctctaccgtcaggctattaaggaaatcctgccgcagtttctgatattgctccggcgcgatatcgacaacctgattttgcaagctacgcatccgctgacccatcagaatatcggtatcagctcgtgcataggcggcaaacagtttctgcagctccagtttcttttgcgccactaacgcattgaactcttcttccggcagacctttatcgcgaaccttcgccagttcacgcgccaccagattaaggttgctgttcagcttgtcgtttggactttcgatgttgatggcacactgcgcacgcagatacagcacacggcagtcaaatccaagaccgatgtctttgctgttactggcacttaacgcttgctgaacatgccagaacagcgcctcgcgggccaggtccgcacgccagtagcgcagcagtgcggcactttcacgaatcggctgccacggcgtatcccacatgatagataaccggtcctgacgcaccgcgtcagtcataatactcaccgcttccgcacgcagcggagaaagcgtcggcaccggagctggcgtttcacgtttgcctttcagttcgccaaacgttttgtttatttggtcgacaacgctgcgcgcatccacgtttcccaccaccagtagcgtcattgcatccggggtgtaccatttctgatagaaatctttaattttttccgcttcaacgggttgtttcagcggatcggcaggatcgtgacctaacaaggtactccctttcagacgatagcgccaccagccctctttagtatcggcaggccaggttgccaccatgtcctgactttgcagcgcgtggttgatggtttctggtgtgatggtcaatttgccagtggcatttgccagataagagagcgcttctttcagcaaatcgttacggttattgggcaaactcagattaaacagcgtggtgtcataagagacaattaccggcggcatcgggcgtttagggtcgatcccctgctgccacaaactacgcgcctgtgctgcgtcaaggccaccgctttgcgttagcgcaatacgagggatggcgtgactgtaaccgctctgttgtgtactttcggcgaggctaccggtattaaccagcaggcgaatttcaacacgatcgctgggacgctggggggtggtcagcacttgccactgtaaaccgttggaaagcgtcccctgttgccatgctggatcaggctggagcgcatctgcctgcacatagccagcagtggccatcatcagcaaaccgcccgctaaaagtcgaatttttgtgccctgcatgtgaacccctgatcaactatcctggtaataaaaaaactgcccgttgtcggtcagtctaaatgacgttaaaaacacttcgtgttagaccgcaagaacatgaaaatgtcacggaagaagtgaaataaacctgaactcacccaggtggtaagttcaggcacaggggtcaattatgcgcaaacacccgcactcggggaagggagtgcgggcataagtgatgagattaagaggataattcgtgcgttttgccatccggcgcacgattattcagcacatcgtccagttttttgtggtccagttctttcacccacttagcaacgacaatggtcgctacgccgttaccgaccaggttagtcagcgcacgagcttcactcataaagcggtcgataccgaggatcagcgccagacccgctaccggcaaatggcccaccgcagagagcgtcgccgccagcacgataaagccactacccgttacccctgccgcccctttagaagaaagcagcaacacgattaacagcgtgatttggtggacgatatccatctgactgttagtggcctgggcgataaacaccgccgccattgtcaggtatatgcttgtgccatcaaggttaaagctgtagcctgtcgggatgaccagccccaccacgcttttacggcagccgagtttctccatcttgtcgagcatacgcggcagcgcgctctcggaagaactagtccccagtacaatcagcagttcttcacggatgtagcggataaatttgaagatactgaaaccagtcgctttagcgatactacccaataccagcaccacaaacaggatacaggtaatgtagaaacagataatcagctgccccagttgcaccagtgtgccgacgccgtatttaccgatggtaaacgccattgccccgaacgcaccaataggtgccagacgcatgatcatattgatgatgccgaagatgacctggctgaaactttcgatgacgttaaaaatcagttggcctttgctgcccagacggtggagcgcaaaaccaaacagtacggcaaacagcagcacctgcagaatgttaccgctggcaaatgcgccaatgacgctcgccgggatgacatccataatgaaggcgacaatgccctggtctttcgcctgatcggcgtaaaccgctaccgctttcgcatcaagcgttgccggatcgacgttcattccggcaccaggctgcacgacgttaacgatgataagaccaataatcagcgcgatggtactgacaatttcaaagtaaagcagtgcgactgcgccggtacgaccgaccgccttcatgctttccatgcccgcaatgcccgttacgacggtacaaaagatgacaggagcgatgatcatcttaatgagcttaacgaagccgtcgccaagcggtttcatttgctcgcctatttcaggatagaaatggccaaggagaataccaatggctatcgctgtcaggacctgaaagtaaaggcttttaaacagagaggttttcatagggtgtcctttagtaaaaccacaggtcttgtaaggttatggggtacctgcggccttaaaataacacccagacaacatcacagaaatgtacctggatcataattgaaacaaaaaggttaaaaagtttgagctggctcgcacaaaccagcactttttaaagttttgtaatcagtttggggtagttacttttcttccaggtaactctcttcgaagatttcaatagggagtgggcgagcaaaaaggaagccctgggcaataccaacgcccgcttttgccagccagtcgcgttgtgcttcagtctccacgccttcggcaatcatttgtaagttcaggctctgcgccagcatgataattgcagcaatcatgctgctatctcccggcaagccttcaacaaacattttgtcgattttcagtacgtcgattggcaagcttttcatatgctgcagctgacgcagccctgcgtagcccatgccgaaatcatccagcgccacccgaactccggcattgcgcagcggacggaggattgccaccgcagcatgagggtcgtcaatacgtcggctttctgtcacttccagaatcagtgttcccggctgaatgcgatagcgggttaacagttccagcatatccgccaccatattcgggtgcatcagttgcagcgcagagaggtttacgctcaagggcagcataatgccgcgctcttgccaggctgcaagcaatcgacaggactcttccagcacccagtgaccgacggtaaccatcagcccacagcactcaatgcgatcgattaagccatccggcaggtcccaactgccatccggttgctggatacgcagtaacacttccgcactgaccagtttaccgctggtcatctcgacctgtggctgtaaccaaatagcaaactgatgattttccagtgcattaaggatatcgctctcttccgtcaaccgcttctgggcggcttccatctgctgcggatcaaagaactgaatctgattcttgcctttatggcgagcggtaaatgccgcagaaatagcgcgactgtaaagctgttcggcggtgagatcgccgtagaacatcgccacgccaatgctacagtgcggacggagttgaatacgttcaatcggcaggcgctcgctcatgatagtgagcacttgctgacctaaggtgattgcgtgccacggttcctgtacaccgttggcaatgacagcaaagtcataaccgctaatctgcgcgaggatcatacgtgggctcagtacgcttttgagtttttccaccagcgtcagcagcagaatttctcgttgcgcctctttcagcacgcccgcagtatcacgcagggtttcacaggtgatgatcatcagcgcggtggtttgtttacgcgcgacaacctgctccagcatctccatcagcaaggctttgttcggcaaatcgctcaccgggaagcgcatcgcattttcgttctgttcttcataatggcgctgcagcaattgctggttgaggttgtaactgcgcaccaacataccgatttcatcgtcctgatgcagacgcggtaatgccagttggtgaccaacaagctccttggctgggatggcgttaagttcgcgagcaatattgcgtaacggatgcaaaatcaggcggttaatgcaccagctgatggcgacggtcaggataaggctcaaaagtaagtaaatggtcactaacgtactgagggtgctcatcacgaacttatacatacggaaggaatccgcctgtagtaccagataggcaattggctgcgggtttgccggacgttcgaggctgtaaacgcccaggctgatttgaaccggtagctcaaacaggcgagtaaccattaccggcaccgggcgctctggaataaaacttttacgcagcgcctggaactggttaggcagcactacatcggcacggctgaccacgcctgccggtttaatgctggcaagaatagcttccgcttcgggaatatcgcctttcaaaatagcactagataagggttcgcggacagagcgagcaatgctttccagttgcgtagccgtgttatagcgattctgctggaccagatggaacagcaaaacggtgcaaaaaataaaaacgaacaccaggacaacggctgccaccattgccatctgcttgattgttaacgagcgacttacgcgcaaattgtctccccccggaaatcccagattgccgcccgagtatacccgatcgcagcggcattaagagaggcgctatctgaaaacttaccagtcggcgtaaggtatcagcggctgcggcggtaaatccatgtcaccctgccatccggcggcggaataacgtacgtagagcaggaaatggctgggtgcgtaatctttcgcctgctggatatcaattgccgtgccaacaaaccagttggaagtaacacgtcgttcaagtaatgcccgcgccgtgtagccgaagccctgactgctgccgccatcgttggattgccgcgcagcttcttcctgccagtcggtcgggatcagattcatcagcggataacgcggcatggttttggtgcgactatggctccagctgccagacgcacccagctcccagctccagttttccgtgcgctcccgccacatcaccggtatggcaaagctcaggtattcctgcggactgtagtaaccgccctgaccgagactgtagccactcagatctttgtcgtaatgccagatcatgttgttcaggccgattgtgacgcggcgattgttctggttaatgaccttatagtaatagcccgtcatccagcgcacgcgccagttatcttcgacatttttaccggttaactggtcgccactaaggcttgcccagacgccgtttgcttcacctttatcgtagctcagacttagccccacaccgtcggcacgtacgccaccccattttttcccggtattgctcggggagtctttttgcccaccaaaggccagcaaagaactggagatgggccgacggtgggcgttaacggtgtaacccagcggcccgatatcatcgctgtaactgatgccgccgaccacatccaccacgttgaagcccatcggcgtggtaccgatatcccagctccagacgtcatttcgccagccgaccgccacgctggcaccggaatcgctctggctgcggttgccgctacagtcctgtaatgtacaggtgccccagttgtcatcccatttgccatcggcattagtggagaaactgccgacgttcatattgacgaaatcactgcgaaagaacatccgcccgtcagaatacggcgcatccacctgcaacatggtagtgtgcgctttcagatcggagtaaccaccggtgccgctgctaccccagtaatcgtgctcaagggtgacgttaagatcctgctggcgatagaggtccgccgcatcgctgcgcacgccacgtttcagccagtcatctttctcgtcgttacgggtcagtcgggtaaaggtgtcgttatcctgcggacgcgtcgtagtcacaccggatgcgaccatggcgtctttgtaggtttccagcgcctgcgttggatcgcccgcctgcgcttcaaacttcgcaccatcacgcagcaccatcgcgctttccatgctcggtggctgagattttgcctgcgggatcaacttattaaacgtccgctgcgctgctgcggtatcgccaagctgcgcctgtgccagcgccacgcgccgctgtgtgttcaggctggcgttatcggtagcgggcagtttcgccagctggctacgtgccgccgctttgtcaccggcagcaatatccacttccgtcagaccaagaatggcgtcggcgttagctggctcccgcgtcaggacattctgatatgcagcgcgggcggcggtgtaatcacgtcgttgttgcgcccagtcagccagcgtgaggtcaatacgcgtggaaggtggttgctggcgcagcatcgcttccgcttctgcctctttgccgctttctcgcaggcggttagcggtttccagcacctgatcgctttgcagtcgattaaccagctcctgaatattgctgttccactgcgcacgcggcaggctattgatatgcgccagcgccgctctgtcctggtcatgaccagagaggtacagcccgtaagcgtaaacctgctccgggtcgttgctcttctgctgcgccagattgcgcattaacgtatcggcctggctgcgttgtccggcctgccagagatcctggctaagtcggtaagtaatccatacgctgccggggtccagcgccagtcgttgccgctgaagtgctgccgcctgcgcccatttgccctggttttccagtgcctctgcctgctgtgccagacggtcgttttgcaggctgcgttcgatatcatcaatgctacgccgctgactggcagagaggctggcgataaacgcttcagctttttctgggctttgctggcggtaaatatttgccagcccgcgcacggcgttagtgttgccgctgtccatacgcaaggtctgctgataataacgttcggcggcgggataatcttttcgcgccatcgccacatcgcccagccccagcactgcataactgtcggtgttatcgacattacgcgcctgctggaacaggcgttctgcccggtcaggattattggctttcagcgcagcatcgccctgctggatcgccagccagtagcggtttactttcagcagactgttccatttgtcgttgttgctgctgtgcgggtccagtgcgagggctttttccagattcgccactgcattggcgcgatcgcctttctgagaatacgcctggcccagcgcccccagagcttcactgtctttcgggttcgcccgcaccgcctgttgtagttcgggaatggctttacccgccataccagagtccaccgccgctaaaccttgcgcacgagcgcggaaagcaggatcggccagctgtttttgctgttctgccagttggctttgcgcagccgccacgctatcgccatcactaaagatgctgagatattttttcagcgcgctcacactggcatcactgacgggcatgtctttaatctgcccgtaccagattttagaggccccttcgcgcccggcgttgctttttgccatctgttccaggacggcaaaaccttcgtcacggcgatcgctactaaacagcaatagcgccagattgttttgcaggcccgtattgcccggtgcatccgcattgatgcgttttaactgattaatcgcttcgccacggcgagccggaattttcgccaccgtactccagtactcgacagcaatgtcaccttccggcggcgcaccgttgaacagtttgttgtaactcgccacagcttcttctgcatgaccggtcgtcgcctgcaatcgtgcctgttgcagtgcctgacgaccatccggcgtggaaagtagcatcgtagtccggctgcttttatacgcattactactcggcgctaactggctcagccgatcgagctgtttttgcgcgccatcaatatcgccctgacgtaacaaagaacggaaacgggcggcaacgacgtccgggttattcggatcaataagttccagccgatataagctctgttgcaccagatcttcacgatgggtcgcttcgcctaaccgaacttgctccagcaactgttgctgagcggttggtgctgcctcgaccatcggcatgacggccagaccgagggaaagcgtgaatatgtttagtgtgaatttgcgcattcctggccccagtcaggtaattactttagtgactatttgcgcattcctggccccagtcaggtaataactcaccttttgtgctgaagcggaaacggtgttgatcccagccttgtccaaacagggtcagcacatagttgtaataggcatcgctgccgggaaagttatcggccacgcgctggcgctgaacggcctgcgcatcgcggttttgtaaaaagggcagcatggcggcagaaaaaccgactggtcctttaccctgcgctttccccgtagccacatccactttttccggcggataaccgtttttctcagtgaatgtcgccatcggtttaaaccggttgagcatccgcgctttttgcggatcgctgtcaggcatcatgcctacccacatgtaaacgcggatagcgtcgtagctgctgatcaatgttttttcggcttttagctgccagcctttgtctttctcatagcgcacccagtctgggctaaaacctttcggggcggtttccagcaataaacgttgattggtttcgcgcagcgtggtccacggcgcgccaaagcgggtgaaatactgcgccagcgtcggcggcaggtagctggggttaaaacgccagctgttatcctcagcaaaacccactttgcccggtaacaacatggaacccagcccaggcaccgtcaccacttcctcccgcgcgatacgttttagcaacgcgctgccgatgtcggtataacgctgctctttccacaaacgccccgcctccagcaagctccaggccatccagacatcaccatcggaggcgctattgctgtccagcacttcccacttactgttctctttcttgccccacagccaggcgggcaaacgttcttttaaagaaccctgagcgagattgttctgcgtccagtcgagaatattatcgaaagctgcacggtcgttagccgccagggcagagaacatgccgtaactttgcccttcggaggtggtgattttgcgcgcgtcgctggggtcgatgacgcgcccttcctgactgatgtaatcctttttaaactgctcccaggcaggccaggtacaggctgcctgaacactaaaggcagccagcagcagcatcgtcacgattccactacgcaacacattcatcttcaattactcgttatccgggttaagacgacgacgactaataattcgcagcagacgccacagtacccatgccagcaatatcacactgatagccgccagcaccgccagcagaatcggatggtttgccagcgcataccacacgcgctcgaaccacggcagatgacctacgtaataaacgtcgccaacacgtaggctgttgataccggactcgcggatcaccgcgacgctaccgaacatggtggcgcgtttgccgctatcgttcaccgcatcgttaagcatttcataaccgcgtgggctatctgccaacagcgcaatcacgctgcgctggtcgttatacgggctctggaagccaatcaccgccgccatcgcaccggaagaggtcagcgtactccgggtttctgccgcgcgatcgctctcgtccggcacaatgccggggaacggggtctggcgcatcggtgttttcacccagctttcggtcgcctgcaccaataggtcgatctgcttatcgtctttcagtttgtccgggataccaccgatgatcatgatgtcggcatctttgccctgaatggtgctgccatcatcggtcaccgtcagattaatcgccgggaagcccgtctgtgcgccgataaaaccaacagtattcagcaacgtttccatctgtgcttcgttaggcgctttcggcatcacggtgatggtttggctcagatccgccatccggctgaatgggaagcccgcgttagcaaaggcgcgtagatccggcatcgggatgaagtggtaatacttgctgaagtcgatggtggagtcgtcaccaatcaccacatgattctgcaccggctggaaggtaatacagttatccacgctaccgcccggcatcgggttcatatactcaaagtcgaagcgcagctggttggtcgcgcccagtttcagcgccggaatagagacatctgttttgccatccagcaaaccttgtaataccggaatccgcagcagcaggcggttcgcctcctgtttgctgctcaggttgaaggattgcaggaactggttattcaggctgatatccatccggctactgtctttcaccggcggcatggtgtagcggtaattaatatccatatcaatgccggtactgcgcatcaggtagagatccggcggcaggtttaggctaacgttaatcgctgctggctcaagaccgctggattgtaactgttcttcataggttttcagttcgccaaatgtgaccggacgatcggtacgtacccagttcggcgcatcgtacggcttacgcggtagcagcggtttcacttcattcactaccacgctttcaccacggaacagaatgttaccctgagcgatacctttcgctgcctgcaacaggtctttgtcgtcacgaccaaacaccaccagcagtttgacgtaaggattctgcggatggttaatcatctcaatcaccggggcttttaccgccggatgatcgcgcaggaagtccggccgtttgtcgttggttgcaaagacaatggcattgcgatccggcagttggttatagagtaccgggaagttctgcccacgccagccagaacggctaccaaaccagctggcgacaatggcagaggcttgttgcagcccaacatccggcgcacccgcaaagaccatcggcaaggtgttggtgcggttatcgctcgggtcaaagaatggcaccgggaagtgactcaggtcattcttcacattcagggtctgataggtcagatccagtccactgctccgcccaacatccagccaaagcgtggtgctggccggtttttcgcacacgtcctgataatggccgacaaactccagccgtacacggttgaagtcgctaataaacagtgggttaatgggcatttgcgccagcgtttttttacccaactgttctttggtcactggcagcacgcccatcagttcatcattgagataaacctttaactggctctggacaggcagtaagcttgggcttggggtgtattcgaggttgagcatcgccttcgtcaccacttcatcgctgcgcataccaaactcaatgctgccgttcgggttaatgccacgtagcaccatgctgcccggcggcggtgcaatttgcgcaaaggtcagcttcacatcacggctaggaccgttctgcgccacgactggcgcatcagcgccctgcacgcccggcatcacttgccccacctgcggattttgttccgtctgggcggctacagctggctcagcattgatcagtggttgcgttgctggcgtcgcctgcgtcatgaaagaggggaacgcactcatccccatagccactgcacaaatccagaatagttttcttttcatcgcgttatcatcattgttgagccaaagcctgatcgcttggttgtgccgtttcgctccgctccgggcggcgcggaataaagcttacaacccaggaaaccagagaagtcagcacacggaatatgcccttcacgctagaaggcgcaaactccgccagatggcggtagccacggaagccgagcttcagaatatccagcagactttccagcggcttatcttccgggtagctgtcctgccagagcgcccatgtatccgcacgggcaaacgtacactgcacaaaatcgatatgttgctgggtggtgagcggcattaatttcagcccaacttcattacccatcacgcgcgccacctgggtcgggaagacgtattcctgctgaccgcgtttaagcaacagattcactttctgcccttccagaatctgcgcctgaccgttgatcttgatccccaaaccaccgtcggagaaatcctgaacggtacagctgaagaggtgaccatcttcgcgggcaattgccgcgggcatcgtcatctccacgcggtggcttcggcgtacctgtttgctttctacgcttaccgcaactgcgccgccaagaacaatcaggttgtagaacacccacaccatactgacgaccacggtgagcatctcggttggcgggccatagaagtagcgccagatgcctaccgcaacgcccaccaggttgagcaggacaaggaagatgtagggccggctgatcacccagtcgacgtactcttcttccaccagtccacctttggcggtgacgttaaatttgcctttgtgcgggttaatcagcgccaccagcgtcggtggtgcgatataccacgccagcaccgtttcgtagatttcactccagaaagagtggcgatatttgccctggatcttggagttggtcaggctggcatggatcatatgcggcagcacgaatagggcgatcatcaacgctggcgcatagatgatgtaggcatgaagcagcaggaacgccagcggcgcagtcaggaagatcagccgtggaatgccgctcaagaagtggaacatggcgttgacgtaacatagccgctgagcaaacttcagccctttaccggtgagcgggttatcgagacggaagatttgtaccatcccgcgcgcccagcgaatacgctgaccgatatgcgcgctcagactttcggtcgccagccccgccgcctgcggaatacgcatatacgcggaggtatagccacgacggtgcaaccgcagagaagtatgcgcatcttcagtcacggtttcgacagcaatgccgccaatttcatccagcggcttacgacgaatcaccgcacaggaaccgcagaagaaagtggcgtcccacatatcgttgccatcctgcaccagaccatagaacagcgtgccttcgttcggcgttttacggaaacgccccaggttgcgttcaaacgggtccggactgaagaagtggtgcggcgtctgcatcatcgccagctgtttttctttcaggaaccagcccatggtcatttgcaagaagcttcgcgttggtacgtggtcgcagtcgaaaatgctcacgaactcgcctttggcatatttcagcgcattgttgatgttgcctgctttcgcatgttcatgagtggtgcgggcgatatatttcacccccacgttttgcgcaaactggcgaaactcttccctgccgccgtcatcaaggatccagatattcagcttatctttcggccagtcgatacccaggctggcgtaaatggtatttttcaccacgttgagatcttcgttgtaagtcgggacaaagatatccacgctcggccacaggctcatatctttcggcaatggcaccggctgacgattcagcggccatactacctggaagtagccgagcaccagcacaatccacgcgtacgtttcagcgaagagcagaataagcccgcacaccaggctgaccggatcgtcccagttcagcgtagaggtgtaacgccaccagatataacggcaagaaacggtcaggctcagcacaatcaacattagcgcgctgaagcgccccggcatccgccgtacgatcagcgctaccccccacagcagcatcaggaagataaactgcgccagcgggttaaacggctgagtaacgcagattaacgccagaatcaggctgaaggtgacgatgataccgaggatcaaccgccgcgccccggcactcaaatgaccgagctcttttttctcatccagatgctgtgttttatggctaacgcgctcaggcagctcgttcatccattgatggtaacgtccacgaatattttgcagaccactaaatgcccgcctgcgcggtttcggcgtttctttgcggcttgcaccgatcaataaccagcatgtttgaatgagataacggaccgggtccagcggacgcggacggctggcgttgatatgcggatacaggtttttatgttctgcgcgaatacgctgccagcgcgggtgctccagcggaataaaaatccaggccaggatcatccagaaacagccgagcgtcgcgctgaaagcgctcgcaccgtgacgacgataatcgcgataacgcccgataagccgcgcgttgaccggcgggataagcaaccaccgggtcaggatactcatgatgcactcccgactggcgtttacatcaacttgcactcccgactggcgttttcagcccggagtagttcaacaggcaccagttcgccagcgtcagtatctcttcagccgccagcgcatcactgcgatattcacctactggttgcttagccgccaggcattcagccatcgcttcatcacgatgaatgagcatcggcagtaatcggcgctggctttgcaaccaaagctggtaaatatcgtcctgaacctgactgccaatacggaagtcattaatcaaaatatgtgcgccatccggcagcgcttgctgatgcagtcggatatggcagttggcatccacattgacgattgccaggctgtgatcgcacaaactcagcagctggtgggttatctggctggcatcacgcggtaagtcgattaaaatccactggtaacgcccgctggcttttagttgctgtaagccggagcaaatatcgctcagccgggtttgccagtgctgtggattttcttgttcttcaatggataactgaccaaaaggcagcaaatcgagctggctggtgtagcgcaacccagcgtcacgccagtcctggccatccagcatcgctctggcccagccctgacggtgggtaaaatcaacattaaaactcaggcgcaacaagttgtccgggcaggcatcgaccaccaggacattttctcccaacatttgtaaactccaggctaatgcggcggtgatggttgttgtccccacgcctccccgcaccccctgctatcccagtacggccattcaccaatcccttacttttgttgcgcaaactctgccagcaacggccagcgttttaatgccgcggccaactgttcgcgttgggaaatatcggcataatcaatatcaggcagactaaatgcctgctttaacgccacaatatcattctggaagatatagcctatcgcgggatcaggcagagtatctggttcattgttattcattttgcttgatccctatgaaataaccgtaccgttcatgagacaattctaaccgtgagcatttcgccggtttattgtttacggcgagacgggaatttgctcactttttgactttccgttacgcaacagaaaaagttaaaaacgaaaagactaaaatcacacgtcttgtgaccttctaaattgattcacatgctaaatctgataagttttaatttcaatggtaggtttatttcttagctttcgctagtaaactgataatcagacaaaatggtgacatgagggacattgtggaccctgtattctctatcggtatcagtagtttatgggatgagctgcgacatatgccagcaggcggcgtctggtggtttaacgtcgatcgccatgaagatgctatcagtctggcgaatcaaacaattgcatcccaggctgaaaccgcacacgtcgcggtcattagcatggacagcgatccggcgaaaatctttcaattagatgattctcaagggccggaaaaaataaaattatttagtatgctaaatcatgaaaaaggtctatactatttgacccgtgatttgcagtgttctattgatccccataattacctttttattcttgtttgcgcaaataacgcatggcaaaacattcctgccgagcggcttcgcagttggttggataaaatgaataaatggagcaggttaaaccattgtagccttttggtaattaatcccggaaataataacgataaacaatttagtttgttgcttgaggaataccgtagtctttttggtcttgccagtttgcgttttcagggtgaccaacatttgctggatattgccttctggtgcaacgaaaaaggggtcagcgcccgtcagcagcttagcgttcagcaacaaaatggtatctggacattagttcaaagcgaagaggcggagatccaaccacgcagcgacgaaaaacgcattctgagtaatgttgctgtactggaaggtgcgccgccgctaagcgaacactggcaactgttcaacaataacgaagtcctgttcaatgaagcccgtaccgctcaggcggcgacggtggtcttttctttacagcaaaatgcgcaaatcgagccactggcccgcagcattcataccctgcgtcgccagcgcggtagtgcgatgaaaatcctcgtgcgggaaaataccgctagcctgcgcgccaccgatgaacgtttgttattggcctgcggtgcaaatatggttattccgtggaatgcgccactctcccgttgtctgacgatgatcgaaagcgtgcaagggcagaagtttagtcgctatgtgccggaagatatcactaccttgctgagtatgacccagccgctcaaactgcgtggtttccagaagtgggatgtgttctgtaatgccgtcaacaacatgatgaataaccctctattacctgcccacggtaaaggcgttctggttgccctacgtccggtaccgggtatccgcgttgaacaagccctgacgctgtgtcgccctaaccgtaccggcgatatcatgaccattggcggtaatcggctggtgctgtttctcagtttctgtcggattaacgatctggataccgcgttgaatcatattttcccattgcctactggcgacattttcagtaaccgtatggtctggtttgaagatgatcaaatcagtgccgagctggtgcagatgcgcttgcttgccccagaacaatggggcatgccgctgcctttaacgcaaagttctaaaccggtcatcaatgccgagcacgatggtcgccactggcgacgaataccagaacccatgcgactgttagatgatgctgtggagcgcagtagttgatataagatgctgtggagcgctcatcatgatgaccatcagcgatatcattgaaattattgtcgtttgcgcactgatatttttcccgctgggctatctggcgcggcactctttgcgacgcattcgcgacaccttacgtttgttctttgctaaacctcgttatgttaaaccggccgggacgttacgccgcacggaaaaagccagggcaaccaaaaaatgactcaatttacgcaaaataccgccatgccttcttccctctggcaatactggcgcggcctttccggctggaacttctattttctggttaagttcggcctgttgtgggcgggatatcttaacttccatccgctcctcaatttggtgtttgccgcgtttctgctgatgccccttccgcgctacagcctgcatcgcttgcgccactggattgccctgccgatcggctttgctttgttctggcatgacacctggttgcctggcccggaaagcataatgagccagggtagccaggtggcggggttcagtaccgattatttaatcgaccttgtcacacgctttattaactggcagatgattggggccatttttgttttattagtggcctggttattcctgagtcaatggattcgcattaccgtttttgtggttgccatactgctatggctgaacgtacttaccctggcgggaccaagtttctccttgtggccagccggacaaccgacgaccactgtaacaacgacgggtggtaacgcagcggcaaccgttgcggcgacgggtggcgcaccggtagtgggtgatatgcccgcacaaactgcaccgccaacaacggcgaaccttaacgcctggctgaataatttctataacgcggaggcgaaacgtaaaagcaccttcccgtctagcctgcccgctgatgctcagccatttgaactactggtgattaacatctgtagcctttcctggagcgatatagaagccgccgggttgatgagccatccactgtggagccatttcgatattgagttcaagaactttaactccgccacctcctacagtggcccggcggcgatccgtttactgcgcgccagctgcgggcagactagccacactaatctgtatcaaccggcaaataacgactgctatctgtttgataaccttagcaaactgggctttacccagcacctgatgatgggacataacggccagttcggcggttttttgaaagaagttcgcgaaaatggcggcatgcagagcgaattgatggatcaaacaaatctgccggttattttgctgggctttgatggtagcccggtttatgacgataccgctgtgcttaaccgctggctggacgttaccgaaaaagataaaaacagccgtagtgccacgttctacaacacgcttccactgcatgacggcaaccattatccgggggtcagcaaaacagcggattacaaagcgcgggcgcagaaattctttgatgaactggacgccttctttactgaacttgagaaaagcggtcgtaaagtgatggtggtcgtggtgccggaacacggcggcgcgctgaagggcgacagaatgcaggtatctggcctacgtgatatccctagcccgtctatcaccgacgtccccgttggggtgaaattcttcggcatgaaggcaccgcatcagggggcaccgattgtcatcgaacaaccgagcagcttcctggctatctccgatctggtggttcgcgttctcgatggcaagattttcaccgaagacaatgttgactggaaaaaactcaccagtgggttgccacaaacagcaccggtctccgagaacagtaatgcagtagttattcaataccaggataaaccgtacgttcgcctgaacggcggcgactgggtgccttacccgcagtaagaacgaaaaaggccgcagagtttcccccctgcggcctggtccgggcgcaaattgccattacggcagcctgacgcccgcatgacacgttacttccgcttgttcagccagttcacgatcatactggcaagaatgccagcaatgaccggagccgctaaatcatgccagaaggccatgcccagctctgcgaacgtcatatagccgcctgtgttgtaatgacaacgtttcgcggctattcttgagtggtctagagtcaagattagcccccgtggtgttgtcaggtgcatacctgcaacgtgcgggggttttctctctccagcaaccaatgccaccagggataaagcccccgcaacattgcgcctcaccggaacctttccggcttgccgctgattctacgattgctttttactgtcagcacccggcaatcttcctcattgcgcgatgccttccagcttaatttctttatttgcaatagttgcagttcatatccgggctgactccagactggtagtgaaatgcgcaattttgtagaattgcgcctcctcgcgacctccccagtgaatctgttgcctcattttttacatactgcgtattcgacttctccacctgttgcgcaagagaaactgggtttattcatttttgcgaggccgacttctttctggacaggactttatgcagcacaacacactaagcaaacacaatcagaaattgccgtttacacgctacgacttcggctgggttttattatgcataggcatggcgattggtgccggaaccgtgctgatgccagtacaaattggcttgaagggaatttgggtatttattaccgcagcgatcattgcttatcctgccacctgggtagtgcaggacatttatttaaaaaccctttctgaaagcgattcctgtaatgactacaccgatattatcagtcattacctggggaagaactggggaattttcctcggggttatctactttttgatgattatccacgggatttttatctactctctctccgtggttttcgacagcgccagctacctgaaaaccttcggtttaaccgatgccgatcttagtcaatctctactttataaagtcgctattttcgccgtactggtggcgattgcgtctggtggtgaacgattactgtttaagatttccgggccaatggtggtggtcaaagtagggattattgtcgtgttcggttttgcgatgatcccgcactggaatttcgccaatataaccgccttcccgcaagcctccgtctttttccgcgatgtcttgcttaccattccattttgcttcttttctgcagtatttattcaggtacttaacccaatgaatattgcctatcgtaaacgggaagcggataaagtactggcaacccggctcgcgctgcgtacccaccgaattagttatatcacgctcatcgcggtgatcctgttttttgcctttagctttaccttcagtattagccacgaagaagccgtttctgcctttgaacaaaatatcagtgcactggcgctggccgcgcaggtgatccctgggcatatcattcatatcacctctacggtgcttaatatctttgccgtactgaccgcattctttggcatttatctcggtttccacgaggccattaaaggcattattctcaatctgttaagccgaattattgataccaagaaaattaacagtcgcgtgctgactctggcgatctgcgcttttatcgtcattacgttgacgatttgggttagctttcgtgtaagcgtgctggtgttctttcagttgggaagcccgttatatggtattgtgagctgcctcattccgtttttcctgatctataaagtcgcacaactggaaaaacttcgcggatttaaagcctggctgattctgctgtacggcattttgctatgcttgagcccactgttgaagctgattgagtaaaccggagcgcatggccccggttttgtgagttaacgctgcggattttcatcctgatcaacagcaaaacaagctaccagttgaccgccgtagtcttttagctgcggctgcaactgggtgcaggggccgaagcgccgacgacagcgggcgttgaaggcgcaacccggcggtggattcagtgggcttggtagttcaccgctgagcttgatgcgctcgcggcgatcgtccgggttcaggcgcggcgtcgcggaaagtagcgcctgagtgtacggatggcgcgggttattgaagatttggtctttcgttcccttctccacgcagcggcccaggtacatcaccatcacttcatcagcaatgtgctccaccacgctcaggtcgtgggagataaagacataagacagccccaactcctgctgcaaatccatcatcagattcagcacctgcgcgcgcacactaacatccagcgcggaaaccggttcatcggcaatcaccacatccgggtcgagcatcagaccacgggcgatggcgatacgctgacgctgaccgccggagaacatatgcggatagcggtcatagtgctcggttttcaggccgactttcgccatcatgctcagggctttttcccgacgctgttctttgcttaagctggtgttgatcagcagcggctcttcaagaatttgcccgacttttttacgcggattcaggctaccgtaagggttctggaagacgatctggattttctgccgacgcagcttctgcgcctgcggatcgtgcttaagcagatcctgcccctggtaatacagctcgccaccggtgggcatttcaatcatcgtcagcaaccgaccgagggtgcttttaccgcagccagattcgcccactactgccagcgttttgccacgttcaaggttaaagctaacgccatccagcgctttaaccagacgttccggcgcgaacatgcctttcttcaccggataatgttttttcaggtcgatagcctgcaacagcggttgttgcagggtggcctcttgcgtactcatagtgtcggcctcccggcatcatcaagtgggtaatggcatttggactgacgcccgtcagcgagcatattcagcgccggttcttcagcgcgacatctgtcagtggcataggggcagcgcgggttaagcaggcagccgttcgggcggtcgtacttgccgggaacgacacctggcaagctcgccagacgttctttgtcctgagcaaattctggcagcgcacgcagcaatgcctgagtatacgggtgacgcggcgcatggaagatggcgtgcgcatcaccggtttccaccacctggcctgcatacatcacgatgattttatgtgccgcttccgccaccagcgccaggtcatgggtaattaacaccagcgccatgttctctttctgctgtagctccagcagtagttcgatgatttgcgcctgaatggtcacgtccagcgcggtggtcggttcatcggcaatcagcagttttggccgacaggcaatcgccatggcgatcatcacgcgctggctcatgccgccggaaagctgatgcgggtaaacatccagacggcttgccggatcgggaataccgacctgattcagcaggtcaatcgctcgctgacggcgggtacttttgttgccgccctgatgcaccttaatcgcttccataatctggaaacccacggtgtagcacgggttaaggctggtcatcgggtcctggaagatcatcgccacttcggcacccaccaggttgcggcgctctttttcactgatacgctgcaaatcctggccgttaaactccagtttttctgccattacgcggcccggataatcaatcagccccataatcgccagactactgacgctcttaccggagccggactcacccacaatcccgaccacttcgccctgttttacgctgtagctgatgcggtctacggcgcggaacggcgcgctttcgtcgccgaaatgcacgcttaatttatctacatttaataacgccatctcgaacctcttactgcttcagtttgggatcgagcgcgtcacgcagaccgtcacccatcaggttaaatgccagcaccgtcagcaggatcgccagacccgggaaggtcacgacccaccaggcgctttgcgcgaactgcaacacgtcggagagcatggtgccccactcaggcgttggcggctgtgcccccatgccgaggaaaccaagagcagccatatcgagaatggcgttagagaaaccgaggctcgcctgaacaatcagcggcgcaaggcagttcgggaagatgttaataaacatctgacgcatcgccccggcacccgccacgcgagacgcggtgacgtaatcgcggttaacttccaccagcacggcggcgcgggttaagcgcacatagtgcggcaaggcaacgaaggtcagtgccagcgcggcgttaccaatgctcgggccgaaaattgccaccagcaccagcgccagcagcagacttggcagcgccagcatgatatcgaccacgcgcataatgatgttatcgaccaggccgccaaagtaaccggcgatcaggccgagaataacgcccataatcaggcttaacacaactaccagacagccaaccagcaggctcaggcgcgcaccgtacatcaggcggctcagcacatcacggcctacgtcatcggtgcccagcaagtgcgccatgctgccgccttcctgccaggctggcggggcgagcagtgcatcgcggaactgttccgccgggttatagggtgcaatccagttggcaaagatcgcgatgaacagcacgatgacgacgtaaaccagcccgacgaccgcgcctttgttgcgtttaaaatagtgccagaactcctgtaacggggtcatcggcaccggtgcgctaatcactttattttcagtaacctgactcatgatgtccccttacttcttatgacgaatacgcgggttcaccacgccgtacagcagatcgaccagcaagttgacgaggataatcatcgtcgccaccagcaatacgccgccctgcactaccggatagtcgcggcgttgcagtgcgtcaatcaaccagcgtcccagaccgggccagctgaagatggtttcggtcagaatcgcccccgccagcaatgttcccacctgcaggccgataacggtcaccaccggcagcatcgcgttacgcagcgcatggacgataatcacccgcatgcgggttagccctttggcgcgcgcggtgcggatgtaatcctcgcccagcacttccagcatgctggagcgtgtcatacgcacaatgaccgccagcggaatagtacccagcacaatggcaggcaagatcatatgggcgacggcatcgataaagttgccgtcttcaccccagatggcggtgtcgattagcataaaaccggttaacggattggagtcatcgaggaacaccatatcgctcacgcgaccggagacgggcgtcaggttccagtgcacgctaaccagcatgatcagcatcatgccccaccagaagataggcatactataacctgtcagcgccaggccaaccgctgtgtgatcgaaaatggaaccgcgtttaaccgcagccagcacgccgaccggaataccgactgccgtagcaaaaatcatcgcgcagacgccaagttccagcgtggcctggaagcgcggcacgaactcttcccaaaccgggatgcggcttttcatactaatgcctagatcgccatgcataacgccccaaatgtaatggagatactgctgccacatcggtttatctaagccgagttcagccagcagctgcgcgtgacgctctggggagatcccacgttcgcccgccatgatcatcaccggatcgcccgggatcatgtggacaaaggcaaatgtgagaagggtaataccgataaacgtggggatgacgagtcccaaacgtcggagaataaactgcaacataacccggattctctatagtgacccgcagcctggaactgcgtgtctgtattgctcacaaatcaattcccgcccttatcggacagggaatgaagtattgctgccggatggcgctgcacgcagaggcacagcgccaccgggtatacagattgttgacaaagtgcgctttgtttatgccggatgcggcgttaacgccttatccggcctacaaaatcgtgcaaattcaatacattgcagaattttcgtaggcctgataagcggagcgcatcaggcatttttgcctttgccatcagtcttgtatggcttttaattattcgatagagacgttttcgaagtgatgtttgcctaatggatcaaccacatagcctttaacttctttacgtaccggttcaaacacggtggagtgagcgatgatcagtgccggagcctgatcgtgcatcaccacctgcgcttgtttgtacagttcaacgcgtttattgtggtcgtcggtagcacgcgccggttgaatcagatcttcaaacggtttgtagcaccatttactgtagttggagccttgttcagaggcggcgcagctgaacagggtggcgaagaagttatccggatccccgttatcgccagtccagcccatcattaccgtctggtgctcgccatctttcgcacgcttgaggtactcaccccattcgtaggtgacaattttggcctgcacgccgactttcgcccagtctgcctgaatcatctccgccatgcggcgagcgttcgggttatacggacgttgtaccggcatcgcccacaggtcgatggagaaacctttttccagacccgcttctttcagcaaggctttcgctttttcaggatcgtaggtgtagtcctgaacgtcgtcgttatagccccacatggttggcgggatcaggtttttcgcacttacgcccgcgccctgataaaccgctttgatgatcgcgtctttgttcaccgcgtaggtcagagcctggcgaactttcacgtcatcgagtggttttttctgcacgttatagctgagataaccgacgttcagccccggcatttccatcagattgatggatttatcctgcttcatgcgagcgatatctgccgggttcgggtacggcatcacctggcattcattcttctgcaatttcgcgtaacgcacggaagcgtcaggggtaatagagaaaaccagcgtatcgatctgcggtttggtgccccagtagccatcaaacgctttgtagcggatacgggaatctttttgatactgctgtaactggaacggaccggttccgattgggttgaggtccagtttttccggtgtaccggctttcatcatcgcatcagcatattctttactcagaatagaggcgaagtccattgccaggtcagcgaggaacggcgcttccgggcgagtcagcacaaactgaacggtgttgtcgtccacctttttcacttcactgatcagctctggcaagcccatgccttcgaagtattcgtagctgccgccagaaactttatggtacgggttttgcgcgtttttctgacgatcgaagctgaacaccacatcatcggcgttcagttcacgcgtcggtttgaattctttattgtcgtgccacttcacacctttacgcagatggaaggtataggttttaccgtcttcgctgacttcccacttttcagcgaggcccgggatcacttcggtggtgccgattttaaattcaaccagacggttataaagcgggacggaagaggcgtcataggtggtgccggaggtaaacagctgcgggttaaacccttccggagatccttcactgcaataaaccagagttttagcctgaacacttgctgcgacggtcatagccaccaggctgagaccaagcttcagcatcccactctttttcaaggaaatacgcattattctgctccaattgtgatgtttgttgttttaaccctttgcagtgggttgtcgctgcctgaccttttttgttttttgcccggtcgggtcaacgttatgaggtggggatgccgtactaattaacatcagtgtaacagtgcggatcctccataaaatgcccctcgtgacctacaatctgtcaacagaatgtgaaaacgtcaatacagccaaccgggatttacaccaacggtgagaatccacacacaaagattaaaaaaacttcaaacagctatttgcagcagagaaatttgtgctactccaacatgaccagaacaatcagcttaatatttagcaacatttggtgattaagttttatgcatttaatgaaaaaaatctgaggaaaaggtggatatctgagcgattaataccatgaacgctaaaacgcacagcggaaaatgccagggccagccataagtaacgcaaaaaaagatttaagcaaatataaaaaaagacaatggtttctgtcacaaatccgttaatggatagtgagatatggggcgcaaatttggcagggaaatgtgtgtcgtgtaggtcgaataaggcggtcgcgccgcatccgacaatggccggcacatttgcctgatgcgacgctgacgcgtcttatcaggcctacgtcgagtcgaacctccctgcccccggaggttctcatcctcatgagctgcagatgcaaaaaagcctgctcgttgagcaggcttttcgaatttggtcggtgatagaggattactcgccacttcgtggctcgccctgcgggccgttgctggcgcaacgttctctcgcttcgctcgagtcgaacctccctgcccccggaggttctcatcctcatgagctgcagatgcaaaaaagcctgctcgttgagcaggcttttcgaatttggtcggtgatagaggattcgaacctccgaccccttcgtcccgaacgaagtgcgctaccaggctgcgccaatcaccgaatgcggggcgcatcttactgcgcagatacgccctcgtcaatcccttaatagcaaaatgccttttgatcggcgagaaagtcagcaggccgcttagttagccgctgcctcttttgcctgcgggatgtgacaccagttgttgttttcgttaattccaccatccggactagtatagccaagacaacccatgatggtatcgtacagctctacgtgacggcgtggcactttcatgtcggcttcttttttcagctgcgcaaacgcctgcgcattggccggattttccagatatttatcactcatccagaccatcatcggtacgcggaactgctccggcggtgccagttcacgcggcgtgccgtgcaggtgctcgcgttcattaatactctcaccgtggtcagctgcgtagaacacaatcgctttcttatcgcgaacctgatcaatcacgctggagataaagtgatccacataggtcacgctgttgtcataggagttgatcatctgcgctttggtacagccgctatcaacaccaatacattccggcttccactgcgcgaagctacgcggataacgctgggtgtagttaaaatggctacctttggtatgcagaatgatcagatgcttaccatccgggttgcgccctaggctttgctgcatttcgtctaccagcaacatatcatctaccggcttgccacgattacgtggctccgcaccaatctgctcacgataagcaatgttgtccgccatcgtgttgctgtagaaccacatttcgctctgcatagcgtagaggtcagaactgaatcctaactgcttcagaaccgcgaaaatgttctgttcttttaatgtgcgctgcggattatcttccgcgcccccctgacgtacaaacatgcaacgcagactgagtttggttgcggtatcacaggagtaaccacggaacgccgccagatttttctcctgggccagtttcggcgtggtattacgctcatagccgaaaatacccatatggtcccaacgcgtggtttcaccgatgataaacacgacataagtgtcatcaacgttttgcggtgcctgataagtgaatttcttcgccggattaagcaaactattattatcggaagattcatcgacccgcgcccaggcatacagccccaacgcagaaagccagttacttggcagataagagttcgctacgacaccgccataactcggcaaatcaacgccggtcgccctctccactttcttctgctggatatccagcaaacgaatcggtgcccaaaccataatacccgccagtacgacgaccgccaggctgcgaatacgctgccctggggttcgcagttgtcggagcaaggtgtagcgacagcggttattccagataaggataagaggcaatgcactaacggcgattaaccagagaataaagttcagaccaacaacttctttactcaggtcgatatcggtggtcatgacggaagcgatgatgccataaccaatgaccacattaaggaaggtcatgtaatagctggcacctgcggaaaagagcaccaccaggcttgccagaatacgccagctgcggcggccaaacaggctaagaagacgtagtaaaaagaaggtcaccagtacggtggcggccagttcaacaacagcagaaatgcctttccagacggtaaaatcgtgcgcatagctgccgaagcggcggtaaaaaaccgcgccattcataaaaaggccaatatagattgcaagcaaaaagctcagcttctgctgtgtaatgcttttgatgtatctcatgcaaacaaaccctggacaaacaggtgataacaccctgcttagtggcttttcaggcccggcagggaaaaagtgcggaggtagtcagataagtaaaatctacacgcgcgaataagtagaccacagcaaagggaaaaagtgtggggaaagagtgtgcatgaagcacaaatttacaaaaatgcaagtttgaaaagagactttagcgttacaaaaagcagtaaaaagggccagttaattggcccaaattttacgagtcattgtttatacatttcgttgatgcgtttgatgcacacggaagctgaagcccagtagctcgcggctgagcattaaagggagccatgcgcctcacgcaacattttctgctctggctgacgaatcgtcgtagaaagcgccaaactcagaatcagcagggcgaaaatcacgtagaaggtcacatagaagccgccaaacagactggcgataatgctaccacaaatgctaccgataccgaaaccgagataaatcacaccgtagtttttcgccaggttattgaggccaaagaactcactgaccagactcggaaagacggtaatagtgccgccaaagttaaatgccacgcaggcaatcgctgcaaagaacgtcactgcattcaatggtgcaaacagcagggccgccatacccaccaggcttatcacctgaccaatggtaataacacggatacgggcgattttgtcagacagaatacccagcaccagacgaccactaaggttggcgatggaaataacagtgactgcattggctgcggaaaccacatcaaggtgtgccagactttgggcgatatctttcgctaccccaatcacgtacaggccgctcatgcaggcggtcaggaacattaccgctaacatccagtactgcggtttacgcatgctctctgccagcgtgtaatctttctccaccacaccattgctggttttcacttcctgttttggtgcgtctttcattaacgttgcgccgaaaacaatcatcaacagcgcaatcgctccccaaatcacaaaggttttttccagaccgaccgtttccagcagctgcgtgtcgataaatttgaaacccaggctacccagaccataagaaccgatagcgaacgcggagatcagacctttacgctccgggaaccacttcacacagttagagagcgtcagcagataacccgcgccatctgccagtcccaccagcacaccggcgcttaaccacagcatcatcaggttgtcagaatgcgctgtcaggaagaagcctaatcccagcaaaatgccggaagccatggtgacgcgtttaacgccaaaacgttcctgtaatttgcccgcaacagaagagctaattgccagccccagacttaacaagccgaaagagaaagcgacctggcttaccggcgcatccagcttggcggaaagcgcgccattaaacaggctccaggtataaacgctccccagcgcaaactgggtaatgatagtaccgatgagtgtcagccagcgggtacgctgataattactaggtgtcatggcagtattcctgcagtaataaaaaggaaaaatctctgccgacaaccataacgaagtgcactttatgcctggggaaaaacggcatgaaatgccatcagaacggaatgaaatgccttagttcaggaatgaatgacgcgacaattattcaccaaatttattatttggtaagttagcacccactatcgccacaactattgttatttaatggtttcaattgtgactgttacgttaaaatctggcgctaacccccatcgtatacagatagtcgctattattagtggtattttctgcctgagttagcgcggcataggcggcaatattttgattgagcaacatatcagcgcctacggtgacatccagccagttgccgttctggtttgtcgccgtcatccggctcaggccactttgcgccttccagatattctcgccaaattgctggttatagctgatttgcgcccagggtcggagatcgccaagccgggagtcaacacgccagcctaaggtactcacgctggcatgccataacggatcggtcagcgtggtagtactgtcgccaaactcgttatacatgctggtggttgtgccatcgtaatgtaatgccgcgaccgggccggttgtaacctgttcatataaaggaaaattccagcccatactcatactgctggtcacatccacaggggtttcttccgccagattgacttccagtcccagcgccctttggctactttgaatacgttggctcaaaatatcgttgtaatcaggttgatgatcactatcccaggtgtaacgctctgtggaaagtccgggttgcgtatcaacgatatattcttgttgccaggcgtaagctgtgttgagaaaaaaggcactgattaccacgctcgccagcaggcttagctgccagcgaccaccgcttttttttatgatcattaacacgactccagggaagagccgaattcggcaatattattgtcattgtatgaaggatatcgggcatagtagccctgtattaaatattgactttttcaccgatgcgtcaagaaaagcggctgaaatttttacgatcgggtacatagcgagggaaagtatggaacgttgcggctgggtgagtcaggacccgctttatattgcctaccatgataatgagtggggcgtgcctgaaactgacagtaaaaaactgttcgaaatgatctgccttgaagggcagcaggctggattaagctggatcaccgtcctcaaaaaacgcgaaaactatcgcgcctgctttcatcagttcgatccggtgaaggtcgcagcaatgcaggaagaggatgtcgaaagactggtacaggacgccgggattatccgccatcgagggaaaattcaggcaattattggtaatgcgcgggcgtacctgcaaatggaacagaacggcgaaccgtttgtcgactttgtctggagctttgtaaatcatcagccacaggtgacacaagccacaacgttgagcgaaattcccacatctacgtccgcctccgacgccctatctaaggcactgaaaaaacgtggttttaagtttgtcggcaccacaatctgttactcctttatgcaggcatgtgggctggtgaatgatcatgtggttggctgctgttgctatccgggaaataaaccatgattcgggaagcgcaacgtagtgaactccccgcgatcctcgaactgtggctggaaagtacaacctgggggcatccctttataaaagcgaattactggcgtgactgcattccgctggtgcgggatgcctatcttgccaacgcgcaaaactgggtctgggaagaagacggtaagcttctcggttttgtcagcattatggaaggccgatttctggcagcgatgtttgtcgcaccgaaggccgtcaggcgcggtattggtaaggcgctgatgcagtatgtgcagcagcgccatccccacctgatgctggaggtttatcaaaaaaatcaaccggcgataaatttttaccaggcacagggttttcacattgtcgattgcgcatggcaggatgaaacccaactacccacatggattatgagctggccggtggttcaaacgctgtaattaactgctggccggtggttcaaacgctgtaagtgtcagttccggaccgttgtatttttccagccatgccagcgccgtattacccgcacagccattccccagccggctgctggggagatctttggtcagcacgttcactgcgccgtttttacaaataccgtcagcggttaaatccagatccggccatgccccttcgtgaatgcaaatcacgccaggtttaattccctcgctaatgaccgctccggcaagaatttgcccgcgtgcgttccacaaccgaacagtatcgccatcttgtatgccgcgctcctgggcatcgtcaggatgaatggtgacaggctcacgatttgccaccgcgtacaattcgcgcagagaactgtaattcagctggctgtgcaggcggtgcgccggatgggcagaaagtacctgcaactgttctggttcggcattgccctgccattcgtccggctccagccacattggatgcccagggcaatccgggtaaccgtaatcggcaatacgctgactgaagatttcaatcttgccgctggcggtttttaacggatgcgccagcggatcgcggcaaaaatcagcgaagcgaataaaccgctcgctgtccgggttttccggcatctcaattaactggttggcttgccagaactcagcaaatggcggcaattcaacctgctggcttgccccgcgctgtcgggcaacgttataaaacgtttccagccattgcagctcactttttccttccgtaaaacgtgcataaccgcccttctcccagcgttcacttaactcggcaaaaacatcaaaatcattacgcgcttcatagcgtggcggcaccacttgcttcatcggcaccagatgctgattactgtaatcaccggtcatggtgagatcattacgctcaaaagaggtagtcgcaggcagaacgatatccgcgtgttttgccgccgccgtccagaagcattcagagatcaccaccagctccggtttttgccaggcacggatcaggcgattggtatcctgatgatgagtaaagttggcaccgcccgcccaccagataaaacgaatatccgggaaatgtcggttcataccgttgtgttgatatgcgccaccagggttttccagtgcttcaacaatgcgggcaacagggattttatccaccgcatcgcagccacccggcaagctgccctgcatggaagagagcaccgcagaacgccgcgtggggttaccaccattggcaaaatggtaagaaagaccaaaaccgccgccgggtgtgccgatttgccccaacattgctgccagcgtgacgatcatccagtgtttttgctcaccaaactgttggcgctgcattccccagcctgccatcagcatggtggtattttggtggaaaatagccgccagctcgcggattttcgctgcgccaacaccacaaatctctgctgcccattcggcggttttcgctattccgtcactctcgcccagcaaataagaggcgaagacggcataacctgtggtgcaacgcgccagaaacgcttcgtcgtgccaaccattttccaccagcgtatgggcgatccccagcatcagcgcaacatcggtgcccatgtgcggtgccacccactccattttatcgccaaagaaatcgacggtttcgcttcgcattggatcaatgcagatcagctttttcccgctgtcacgcagtgcagaaaagtaagaaagcccctgctcatcggatgcattccacgcaattttcagcgtattgagtgggttagcactccacagcaccacgacatcgctatgttccagcaccagcggccaactggtctgctgttgataaacttcactaccacccacgacatacggcatgatcgcctgtgccgcgccggtgctataatcccccagatgcccggtataaccgcctgccagcgccatatagcgttgtaataatgtgctggccttatgcagcacgccgttactacgccagccgtaggaaccagcaaaaatgcttgccggaccataagcctcacgaatgcgtttatgttgttggtgaataagatccagcgcctcatcccaactcacgcgaacaaattcatcctgcccacgaatgccttgcgggttttccggactcgcaagaaagccttttcgcaccattggaaatcgtacccgcgtattgctgtgaacctggtcgcgaaccgcgctctgcaaggagttttccattcctgtggctaacgcgccacggctgctaaacacggtttcgccgtcggtttcaaccagcatgggcccccaatgggcggcagtcagaacggaatatcgtgaggatgagttggccaaaccgaagactcctgaaaggttagatgtattgagcagttaaatattacttacaaatttccgagtattcccaggaataatcttcatgttcacgcggcataatctcccgccacggaacccgtggcaaagaataaaaaggttattaaggattaacaatgaagaaacgtgtttatcttattgccgccgtagtgagtggcgctctggcggtatctggctgcacaactaacccttacaccggcgaacgcgaagcaggtaaatctgctatcggcgcaggtctgggctctctcgtgggcgcgggtattggtgcgctctcttctagcaagaaagatcgcggtaaaggcgcgctgattggcgcagcagcaggcgcagctctgggcggcggcgttggttattacatggatgtgcaggaagcgaagctgcgcgacaaaatgcgcggcactggtgttagcgtaacccgcagcggggataacattatcctcaatatgccgaacaatgtgaccttcgacagcagcagcgcgaccctgaaaccggcgggcgctaacaccctgaccggcgtggcaatggtactgaaagagtatccgaaaacggcggttaacgtgattggttataccgacagcacgggtggtcacgacctgaacatgcgtctctcccagcaacgtgcggattccgttgccagcgcgttgatcacccagggcgtggacgccagccgcatccgtactcagggccttggcccggctaacccaatcgccagcaacagcaccgcagaaggtaaggcgcaaaaccgccgtgtagaaattaccttaagcccgctgtaatccctttcatgccaggtgatgcagaaatcacctggcattcttcagttttccttcatcatatttcaggctaaggtgatcgccttatcagtgaatggagagaagcatgaagccgtccgttatcctctacaaagccttacctgatgatttactgcaacgcctgcaagagcatttcaccgttcaccaggtggcaaacctcagcccacaaaccgtcgaacaaaatgcagcaatttttgccgaagctgaaggtttactgggtagtaacgagaatgtaaatgccgcattgctggaaaaaatgccgaaactgcgtgccacaagtacgatctccgtcggctatgacaattttgatgtcgatgcgcttaccgcccgaaaaattctgctgatgcacacgccaaccgtattaacagaaaccgtcgccgatacgctgatggcgctggtgttgtctaccgctcgtcgggttgtggaggtagcagaacgggtaaaagcaggcgaatggaccgcgagcataggcccggactggtacggcactgacgttcaccataaaacactgggcattgtcgggatgggacggatcggcatggcgctggcacaacgtgcgcactttggcttcaacatgcccatcctctataacgcgcgccgccaccataaagaagcagaagaacgcttcaacgcccgctactgcgatttggatactctgttacaagagagtgatttcgtttgcctgatcctgccgttaactgatgagacgcatcatctgtttggcgcagaacaattcgccaaaatgaaatcctccgccattttcattaatgccggatgtggcccggtggttgacgaaaatgcactgatcgcagcattgcagaaaggcgaaattcacgctgccgggctggatgtcttcgaacaagagccactgtccgtagatagcccgttgctcagtatggccaacgtcgtcgcagtaccgcatattggatctgccacccatgagacgcgttatggcatggccgcctgtgccgtggataatttgattgatgcgttacaaggaaaggttgagaagaactgtgtgaatccgcacgtcgcggactaagccgcgactgcgtagagtaaagcccgataatcgctcgggcttttactctttattgggttgcagtaactgctgtagtccaggcctgattaaacgcctgatgctgtgccggtaatggcgcaatcagtttgttatattcacttgcctgctgactagtcgggaactggatgccatttgcgacaaagctcacctgagtaccttgctgagcaatgtagtctccaaccatcaccagttgttgcgtgaaagtttgtgccgccggaatcaacggttgcaatgcatcagctggcgtcgttaccactttggtgaatgcctgatcaaagaccggtttcaaatcatcgctctgttttagcgcagagtgcgcagcatcggcctgcaacttcgcattttgcagttgttgcgccagcacacccaggctaccgttcatttcacgcagcggaccgctttgcgtaacgtaatcctgcggtacgcgaattgcgttaacgctgtctacaaccgggcgcagaccggaatccatcgcctgattcacctgctgagaataaccatacagaatcgcgtaatcagagacaaaaggaccaaactgttttttctgatcggcagtcagggttggtagacgttcaccgctacgcatcactgtattctgcaggaagtcgataaacgctttacgctgatcgccttctttatcaaaacacccactcaggctaactaccattaataacgccgcaagaggcgcaaaccagcgagagcaggactttcctgtcgccattttcttactcctttcacccaaaaaaagcgcacaacgacacacgcgtgtctgacgtgacaaggatagtccaggacaggcttgcaggataccctttctacgtaatcttcctggtaaaatcatggagaaaatgaaacaaggttaatttgttgtttcattgttaaaaaatgatagtgccgttgccttttttgtagccagagatttacgccttcgcagaaggttagattttcgaaatctttacaaaacaggagtggtaagagatatatcggcatttatcagatcgttaggtggctataagtcacgctaaatgacaggctgaatcgaatcatagccagagcatgccctgacttcaccccgctgtgtctgcttttcccgactattcttaatgagcttcgatgcaattcacgatcccgcagtgtgatttgaggagttttcaatggaatataaagatccaatgcatgagctgttgagcagcctggaacagattgtttttaaagatgaaacgcagaaaattaccctgacgcacagaacaacgtcctgtaccgaaattgagcagttacgaaaagggacaggattaaaaatcgatgatttcgcccgggttttgggcgtaagtgtcgccatggtaaaggaatgggaatccagacgcgtgaagcctagtagtgccgaactaaaattgatgcgtttgattcaagccaacccggcattaagtaagcagttgatggaataaacttttatccactttattgctgtttacggtcctgatgacaggaccgttttccaaccgattaatcataaatatgaaaaataattgttgcatcacccgccaatgcgtggcttaatgcacatcaacggtttgacgtacagaccattaaagcagtgtagtaaggcaagtcccttcaagagttatcgttgatacccctcgtagtgcacattcctttaacgcttcaaaatctgtaaagcacgccatatcgccgaaaggcacacttaattattaaaggtaatacactatgtccggtaaaatgactggtatcgtaaaatggttcaacgctgacaaaggcttcggcttcatcactcctgacgatggctctaaagatgtgttcgtacacttctctgctatccagaacgatggttacaaatctctggacgaaggtcagaaagtgtccttcaccatcgaaagcggcgctaaaggcccggcagctggtaacgtaaccagcctgtaatctctgcttaaaagcacagaatctaagatccctgccatttggcggggatttttttatttgttttcaggaaataaataatcgatcgcgtaataaaatctattattatttttgtgaagaataaatttgggtgcaatgagaatgcgcaacgccgtaagtaaggcgggaataatttcccgccgaagactcttactctttcaatttgcaggctaaaaacgccgccagctcataactctcctgtttaatatgcaattcacacagtgaatctcttatcatccaggtgaaaaataaaagcgtgaaacaaatcactattaaagaaagtaatctatatttctgcgcattcccagcctcctgtgttgatttccaacgagtataactttgatttatagtcaggtggggcttttctctgtctgcctttcggtgaatacctgagacaaacagtctcaagcacccgtggctattctagcttaataagtttgtttcttctccttgatataatcctaaaaaaatctcataaaattaatatatgagataatctttattcagcagaagattattaaaggttgctgtattatttagcgataaaaaaagcctgccagatggcaggctatttaataacggcgttattattgcaacaggctaatatccgcaacgcgcaggaacagttcgcgcagtttctccagcatggtcagacggttgatacgcaattctttgtcatcaaccatgaccatcactttatcgaagaaagcatcaaccggttcacgcagctcagccagttcgaccagcgcatcctggtaacgaccttccgtaaagtacggctccagcttgtcacgtagcaccacaacctgcatcgccagtttaatttcttccggctctttcagggtagaggcattcacgcggtcgctcagcacttcgtcagatttcgccagaatgttagatacacgtttgttcgccgccgccagtgcagcagctgcatccagggtacggaaatggcttaccgctttcatacgggcatcgaaatcagccggacgagtcggacgacgcgccagtaccgcctggatggtgtcaacggtataaccttcgtcctgataccaggcgcggaagcgaccgagcataaagtcgataacatcatcaactacgttggcattagtcagcttatcgccatacagacgcaccgcttcttcggtcagcgtttgcagatcaaggttgaggttcttctcaacgataattcgcagcacgccaagcgcggcacgacgcagcgcaaacgggtctttgtcgcctttcggatgctgaccgataccgaagatacccgccagggtatccatcttgtcagcaatcgccagcgcacaagctactgggttggacggcaggtcatcaccagcaaaacgcggctgatactgctcattcagcgccaccgcgacatcttccgcttcgccatcgtgacgcgcatagtgcatccccataacgccctgggtgtcggtgaactcgaagaccatgttggtcatcaggtcgcacttagacagcagacccgcacgggtagcgtggttaacgtcagcgccaatctgttcagcaatccagccagccagcgcctggatgcggtcagttttgtcgcgcagcgtccccaactgttgctggaacaacacggtttgcaggcgcggcaggttatcttcaagacgttttttacggtcggtgttgaagaagaactcggcatccgccagacgcggacgaacgactttctcgttaccggagataatctgctgcggatctttgctttcgatgttggcaacgaagataaagttcggcagcagtttgccgtcgttcgcatacaccgggaagtatttctggtcacctttcatggtgtaaaccagcgcttcagccggcaccgcgaggaatttctcttcgaattttgcggtcagaacgaccggccactccaccaggctagccacttcttccagcaggctttcgcttaagtcagcgttaccgccaatcttacgcgctgcttcttcggcatcggctttaatcttcgccttacgttcttcgtaatcggcgatgactttcccacgctcacgcagaatttccggatactgatcggcgttatcgatggtgaattccggctcgcccataaagcggtggccgcgaatcacgcgatcggactgaatgcccagaatggttgccggaatgactttgtcgcccagcagcagggtcacggtgtgcaccggacgcacgaagtgcacgtcgcttgcgccccaacgcatcagtttcgggatcggcagtttcgccagagaagtcgcaaccatattcggcagcagtgcttcggtgctttcgcccttcacatgggcgcgatacagcagccattcgcctttatcggtagtcagacgctcagcctggtcaacggtaataccgcaaccacgcgcccaaccttctgccgctttgctcggtttgccttcagcgtcgaacgcctgggcaatcgccgggccgcgtttttcgatttcacgatccggttgcgcttccgccaggttagctactttcagcgccagacgacgcggagcagcaaaccattgaacggtgccgtgtgcgaggccagcgttatccagctccgcagtaaagttcgcagcaaaggactcagccaggctgcgcagtgcttttggtggcagctcttcagtgccgatttccaccagaaaagttttctcagacatagccgcctcttacttatctttgttgcacatcgggaagccgagggcttcacgggaagcgtagtatgcttctgccactgctttggtcagggtgcgaatgcgcagaatgtagcgctgacgctcggtgacggagatggctttacgcgcatccagcaggttgaagctgtgggcggctttcagaatacgctcgtaggctggcagcggcagcggattttccagcgccagcagctgctgcgcttctttctcgtactgctcgaagcaggtgaacaggaagtccacatccgcgtattcgaagttgtaagtggactgctccacttcgttctgatggaacacgtcgccgtaggtggttttacccagcgggccgtcgctccagaccaggtcgtaaacgctgtctacgccctgaatgtacatggccagacgttccagaccgtaggtgatctcgccggtaaccggtttacactccagaccaccaacctgctggaagtaagtgaactgcgtcacttccatgccgttcagccacacttcccagcccagtccccaggcacccagcgtcgggttttcccagttatcttccacgaaacggatgtcgtgaatagtcgggtccatgcccagctctttcagagaaccgaggtacagctcctgaatattgtccgggcttggcttaatgaccacctggaactgatagtagtgctgtaaacggttggggttttcgccgtagcgaccatcggtcgggcgacgagaaggctgaacataagcagccgccatcggttctggccccagctcgcgcagacaggtcattgggtgagaggttcccgcgccgacttccatgtccaatggttgaacaatggtgcagccctggcgagcccagtaatcctgtaaggtcaggatcaagccctggaaggtcctggtatcaaacttttgcatattatttcgtgctggatacgtgtggatttaaaggaagggatcagtatacccgctggatggaagatatacagtacgaaacgggaaaaagcagggcttaacgcatggaaagatgcaaaaaatggccatccgcgtcaaaagaacagacaaactgctctttacggaaggtataaccgcgcatttcatagcttccctggaactgttcgaaggcggtgacgtcgattttttgctcgccggtgttataacgttttgccgcctgatccttgcataacgcttccatattcaagctacgcagaggatcaacctttacccgttgtgctttctgcacgggactcggtatagaacaacccactagcaccataagcgccattgccggaaagaaagcgttcatcatcattaaattaccgtctggtttgcaggtgagtcttattatttatatcggtatagtggctgatatcttacgaatttccttaagcctctataagctgtagtgataaaactcagattattccagtgcgccaaccaaatgatttatcggtcagactttttttaaccagatacagagacacagatgcagcccaaaatttactggattgataacctgcgagggatagcgtgtttaatggtggtgatgattcacaccactacctggtatgtgaccaatgctcatagtgttagccccgtcacatgggatatcgccaatgttctgaattctgcctctcgtgtcagcgtgccgctatttttcatgatttccggctatctcttttttggcgaacgcagcgcccagccgcgccatttcttgcgtatcggcttatgtctgattttttatagcgcaatcgcactgctctacattgcgctgtttacctccatcaatatggagttagcgctgaaaaacctgctgcaaaagccagtgttttaccacttgtggtttttcttcgcgattgcggtgatttatctggttagtccgctgattcaggtgaagaacgtcggcggaaaaatgttgctggtgctaatggcggtgattggcattatcgctaacccaaacacagtgccgcagaaaattgacggttttgaatggctgccaattaacttatatatcaatggcgatactttttactacattctgtatggcatgttgggccgcgctatagggatgatggacacacagcataaagcactgagctgggtgagcgccgcgctgtttgcgacgggggtttttattatctctcgcgggacattatatgaattgcagtggcgcggaaattttgccgatacctggtatctttactgtgggccgatggtttttatctgcgcaatcgcgctattgactctggttaaaaacacgctggatacgcgtaccattcgcggacttggcttaatctcccgccatagtttgggtatatacggattccacgccttgattatccatgcgctgcgcacccggggaattgagcttaaaaattggccaatactggatattatttggatcttttgcgcgacgttggcagcgagtttgttactttctatgctggtacaacgaatcgacagaaacagattagtgagttaagtaaaagcccggtcacattggactgaccgggcttacgtgagttattcgctgtattcttcctgggtaacctgtgtttcttttggtgggtttattccggcatcacgaatatttttctgcaccgctactgcaccaaacaagcttaagaagaaagccagtccataaaaacctttttcgctgagtaataatgtcgcattccacagacctaccatcagtaatgcaacagagataataaagacagtcaggcaggtcatataataaatggaagtggtcggtatgccttcatacttgtcccgaacggtcttttgataagacgccgcagaaaacagtcctaataccagtacggcaaaataatatcctttttcatttaactgcatctctgcattccatagccctaacagataggtaacgataccaccaacgagagctatccaactcacaatactaaaggccggactataggtacttattttgttgtccatcacagtattcctttcattcctgaatatgtaagagctttatgttgctcatgcgctgcgaaacaaacgcatttgaccaaacaagcagacaaaaaaggcgatgggatagatcaccatttcataagtattgataggtgcgtttaaaacaccgataaacaagagaccgatagtgattaacgcaactaactggcagatatgggtaaaaaaatcatccagttgcccgagtttttctgcgcgaagatatgcatagttgccaaaagttgctgtcattaacacgccaagaaaatagccttttccacttaacaatgggcaactgatccatagcccaaccagataaaccagcgccccgacaacaaataatagtttcgccacagtcttactggttttcataacgatctccatatctaccagcgatacattacgagtaaccaacgaaagacaaaactgaaaaatgccattaacaaatgattttcagaataaattcatactaaatattaattaattactgagatatatagatgtgaattatcccccacccggtcaggcaggggataacgtttacgccattaatggcagaagttgctgatagaggcgacggaacgtttctcgtcgtggctgataagcggcataacgctgcgcatctggtagatggctctgttctaacggtagttgcggcaacaattcaatgaggcttttctctggattcgccgcgatctgcgccagccttgctgcgcccagtgctggccccacatccccccccgtacggtaatcgagctgctgaccgctgatatccgccagcatctgacgccagtactcactacgcgccccgcccccaatcaacgtaacactttgcggtttaataccgcaggcatgcacgacatccatgccatctgccagcgcataacccacgccttccagcactgctcgcgccagttcattggggccatgttgatgagtcaaaccaaagaaaacccccttcgcctggggattattgtgtggcgtacgctcgccggaaagataaggcagaaaccaaactggctcggcactttcatcagcctgttgagctgcagcgattaaagctgggacattgctcaggccggttaatttcgcggcccaatccagacagctcgctgcactcagcatcacagacattaaatgccaacgttgcggtagcgcatggcaaaagctatgtacggcgctttctggcttgcttaagaacccttcgctgacagcaaaatagaccccgctcgtccccaggcttaacattgcctgattagcatcaaccattcccacaccaactgcaccagctgcattgtcgccaccgcctgcgacaactggcaccgtcgccataccccacgctttcgcaacttcaggtaacaaagcaccagtaatttcgctgccttcgtataatgcgggcatctggtcacgagataagtcgcaagcctgcagcatgacgtcactccagtcacgctttgcgacatccagccacatggtgccagctgcgtcagacatatcgctggcaaactcccccgtcatacgcagacgcaagtaatctttcggtaataatactttgtcgatttgacggaatatctccggctcatgccgctgaacccatagcaatttaggcgcagtaaatccgggcatcatcaggttgccggtaatcacccggctttgcggaactcgcgcttccagcaaagtgcactcttgcgcacagcgcccgtcgttccacaaaatggcagggcgtaacacccgttgctgagcatccagcaaggttgctccgtgcatctggccggcaatacccaatgctttaacgtcctgcagagaatgctgatcgcccagagctttcattgcgcgatcagttgcctgccaccactgttccgggtcttgttcgctccagagtggatgcgggcggctaacggtcagcttttccgtttgcgcagcaaccacctcaccctgctcgttgagcaaaataacttttacgccgctggtgccaagatctatcccgatatacatatcgatcgttccttaaaaaaatgcccggtatcgctaccgataaccgggccaacggactgcacagttagccgttatttgtcgaacagataatggtttaccagattttccagttgttcctggcgaccactctgatgcaccggagacaaatgatgttcctgagcatatttggctaaatctgccagactcatttggcctttcaggatttgctggcccaattcgctattccagccggaataacgctgcgcgatgcgtttatccagctcgccatcttcaatcatgcgcgctgcaattttcagcgccagtgccatcgtatccatcgcgccgatatgaccgtaaaacagatcatatttatcagtactttgacgacgtactttggcatcgaagttcagaccaccggtggtgaaaccgcctgctttgagaatttcatacatcaccagcgcattctcttccacactgttcgggaactggtcggtgtcccagcccagttgcgcatcgccacggttggcgtcgacagaaccgaacaggccaagcgcaatggcggtggctatttcatgatggaaagagtgacctgccagcgtcgcgtggttagcttcaatgttcagtttaatctctttttccagaccaaactgtttcaggaagccatagaccgtcgcggcatcgtaatcatattgatgtttggtcggttcttgcggtttcggttcgataagcaacgtgccctggaaaccgattttatgtttatgctcaaccaccatctgcataaagcggcccagttgttcacgctcctgacgcaagtcggtatttaacagcgtttcgtaaccttcacgaccgccccacaggacatagttttcaccgcccaatttatgggttgcttccatcgctgtaacaacttgcgttgccgcccagctgaagacttcaggatctgggttcgtcgccgcacccgcgccgtagcgagggtttgtaaagcagttggccgttccccacagcagcttcacgccgctctcttcttgcttgcctgccaggacatcaaccatttgcgcaaaattattgatgtactcttttaagctcgcgccctcaggggaaacatccacatcgtggaagcaataaaatggcacatgtaacttgtggaaaaactcaaatgcgacatctgctttacgcttcgccaacgccagtgcctcaccaggctgctgccacggacgattaaacgcccccacaccaaacatatccgccccgttccagcagaaggtgtgccagtagcaggcggcaaaacgcaagtgctcttccatacgcttacccaacaccagttcgtcgggattgtagtgacggaatgctaacgggttactggatttactgccttcataacgaacgcgatcgagctggtcaaaataggcttgcatattgaactccataatcaggtaatgccgcgggtgatggatgatgtcgtaatattgggcactccctttcagttgctcaattatgttatttcacactgctattgagataattcacaagtgtgcgctcgctcgcaaaataaaatggaatgatgaaactgggtaattcctcgaagagaaaaatgcaataagtacaattgcgcaacaaaagtaagatctcggtcataaatcaagaaataaaccaaaaatcgtaatcgaaagataaaaatctgtaattgttttcccctgtttagttgctaaaaattggttacgtttatcgcggtgattgttacttattaaaactgtcctctaactacagaaggccctacaccatgaaaataaagaacattctactcaccctttgcaccagtctcctgcttaccaacgttgctgcacacgccaaagaagtcaaaataggtatggcgattgatgatctccgtcttgaacgctggcaaaaagatcgagatatctttgtgaaaaaggcagaatctctcggcgcgaaagtatttgtacagtctgcaaatggcaatgaagaaacacaaatgagccagattgaaaacatgataaaccggggtgtcgatgttcttgtcattattccgtataacggtcaggtattaagtaacgttgtaaaagaagccaaacaagaaggcattaaagtattagcttacgaccgtatgattaacgatgcggatatcgatttttatatttctttcgataacgaaaaagtcggtgaactgcaggcaaaagccctggtcgatattgttccgcaaggtaattacttcctgatgggcggcagcccggtagataacaacgccaagctgttccgcgccggacaaatgaaagtgttaaaaccttacgttgattccggaaaaattaaagtcgttggtgaccaatgggttgatggctggttaccggaaaacgcattgaaaattatggaaaacgcgctaaccgccaataataacaaaattgatgctgtagttgccagtaacgatgccaccgcaggtggggcaattcaggcattaagcgcgcaaggtttaagtgggaaagtagcaatctccggccaggatgcggatctcgcaggtattaaacgtattgctgccggtacgcaaactatgacggtgtataaacctattacgttgttggcaaatactgccgcagaaattgccgttgagttgggcaatggtcaggaaccaaaagcagataccacactgaataatggcctgaaagatgtcccctcccgcctcctgacaccgatcgatgtgaataaaaacaacatcaaagatacggtaattaaagacggattccacaaagagagcgagctgtaagcgttacgccccagcgcggagcgggggcgtgatttctctccatgccgcgtgaatgaattggcttaggtggagtcgttatgccttatctacttgaaatgaagaacattaccaaaaccttcggcagtgtgaaggcgattgataacgtctgcttgcggttgaatgctggcgaaatcgtcagtctttgtggggaaaatgggtctggtaaaagtacgctgatgaaagtgctgtgtggtatttatccccatggctcctacgaaggcgaaattatttttgcgggagaagagattcaggcgagtcacatccgcgataccgaacgcaaaggtatcgccatcattcatcaggaattggccctggtgaaagaattgaccgtgctggaaaatatcttcctgggtaacgaaataacccacaatggcattatggattatgacctgatgacgctacgctgtcagaagctgctcgcacaggtcagtttatccattagtcctgatacccgcgttggcgatttagggcttgggcaacaacaactggttgaaattgccaaggcacttaataaacaggtgcgcttgttaattctcgatgaaccgacagccagtttaactgagcaggaaacgagcattttactggatattattcgcgatctacaacagcacggtatcgcctgtatttatattagccacaaactcaacgaagtcaaagcgatttccgatacgatttgcgttattcgcgacggacagcacattggtacgcgtgatgctgccggaatgagtgaagacgatattatcaccatgatggtcgggcgagagttaaccgcgctttaccctaatgaaccacataccaccggagatgaaatattacgtattgaacatctgacggcatggcatccggttaatcgtcatattaaacgagttaatgatgtcagcttttccctgaaacgtggcgaaatattgggtattgccggactcgttggtgccggacgtaccgagaccattcagtgcctgtttggtgtgtggcccggacaatgggaaggaaaaatttatattgatggcaaacaggtagatattcgtaactgtcagcaagccatcgcccaggggattgcgatggtccccgaagacagaaagcgcgacggcatcgttccggtaatggcggttggtaaaaatattaccctcgccgcactcaataaatttaccggtggcattagccagcttgatgacgcggcagagcaaaaatgtattctggaaagtatccagcaactcaaagttaaaacgagctcccccgaccttgctattggacgtttgagcggcggcaatcagcaaaaagcgatcctcgctcgctgtctgttacttaacccgcgcattctcattcttgatgaacccaccaggggtatcgatattggcgcgaaatacgagatctacaaattaattaaccaactcgtccagcagggtattgccgttattgtcatctcttccgaattacctgaagtgctcggccttagcgatcgtgtactggtgatgcatgaagggaaactaaaagccaacctgataaatcataacctgactcaggagcaggtgatggaagccgcattgaggagcgaacatcatgtcgaaaagcaatccgtctgaataacgcattgaggagcgaacatcatgagcaaaagcaatccgtctgaagtgaaattggccgtaccgacatccggtggcttctccgggctgaaaagtctgaatttgcaggtcttcgtgatgattgcagctatcatcgcaatcatgctgttctttacctggaccaccgatggtgcctacttaagcgcccgtaacgtctccaacctgttacgccagaccgcgattaccggcatcctcgcggtaggaatggtgttcgtcataatttctgctgaaatcgacctttccgtcggcagtatgatggggctgttaggtggcgtcgcggcgatttgtgacgtctggttaggctggcctttgccacttaccatcattgtgacgctggttctgggactgcttctcggtgcctggaacggatggtgggtcgcgtaccgtaaagtccctagttttattgtcaccctcgcgggcatgttggcatttcgcggcatactcattggcatcaccaacggcacgactgtatcccccaccagcgccgcgatgagtcaaattgggcaaagctatctccccgccagtaccggcttcatcattggcgcgcttggcttaatggcttttgttggttggcaatggcgcggaagaatgcgccgtcaggctttgggtttacagtctccggcctctaccgcagtagtcggtcgccaggctttaaccgctatcatcgtattaggcgcaatctggctgttgaatgattaccgtggcgttcccactcctgttctgctgctgacgttgctgttactcggcggaatgtttatggcaacgcggacggcatttggacgacgcatttatgccatcggcggcaatctggaagcagcacgtctctccgggattaacgttgaacgcaccaaacttgccgtgttcgcgattaacggattaatggtagccatcgccggattaatccttagttctcgacttggcgctggtagtccttctgcgggaaatatcgccgaactggacgcaattgcagcatgcgtgattggcggcaccagcctggctggcggtgtgggaagcgttgccggagcagtaatgggggcatttatcatggctagtctggataacggcatgagtatgatggatgtaccgaccttctggcagtatatcgttaaaggtgcgattctgttgctggcagtatggatggactccgcaaccaaacgccgttcttgattttgataaaaattttctcaaagccggttacgtattaccggttttgagtttttgcatgattcagcaggaaaagaaccatgtttactaaacgtcaccgcatcacattactgttcaatgccaataaagcctatgaccggcaggtagtagaaggcgtaggggaatatttacaggcgagtcaaagcgaatgggatattttcattgaagaagatttccgcgcccgcattgataaaatcaaggactggttaggagatggcgtcattgccgacttcgacgacaaacagatcgagcaagcgctggctgatgtcgacgtccccattgttggggttggcggcagctatcaccttgcagaaagttacccacccgttcattacattgccaccgataactatgcgctggttgaaagcgcatttttgcatttaaaagagaaaggcgttaaccgctttgctttttatggtcttccggaaagtagcggcaaacgttgggccactgagcgcgaatatgcatttcgtcagcttgtcgccgaagaaaagtatcgcggagtggtttatcaggggttagaaaccgcgccagagaactggcaacacgcgcaaaatcggctggcagactggctacaaacgctaccaccgcaaaccgggattattgccgttactgacgcccgagcgcggcatattctgcaagtatgtgaacatctacatattcccgtaccggaaaaattatgcgtgattggcatcgataacgaagaactgacccgctatctgagccgtgtcgccctttctagcgtcgctcagggcgcgcggcaaatgggctatcaggcggcaaaactgttgcatcgattattagataaagaagaaatgccgctacagcgaattttggtcccaccagttcgcgtcattgaacggcgcagtacagattatcgcagcctgaccgatcccgccgttattcaggccatgcattacattcgtaatcacgcctgtaaagggattaaagtggatcaggtactggatgcggtcgggatcagccgctccaatcttgagaagcgttttaaagaagaggtgggtgaaaccatccatgccatgattcatgccgagaagctggagaaagcgcgcagtctgctgattagtaccaccttgagcatcaatgagataagccaaatgtgcggttatccaagcctgcaatatttctactctgtttttaaaaaagcatatgacacgacgccaaaagagtatcgcgatgtaaatagcgaggtcatgttgtaacgatgatgagaattgtcggcgtcacatcaggtaacgctgcgtggttgtcggatgcggcgtgaacgccttatccgacctacccgccaggcatgataaaacgcaccaacaacgcttcaggctcgtagctcaactgcctgagacaaagtaaaaagccttatccgactgacaagtcggataaggctcaaggaaatgcaattacatatgcgccgcgattaaccgttggttatcctggtacattgcgaacaggtagttgttataactcttccctttggtgctgtagcccttcagcttgtgaatcatcgctgtggcagtcacttcctgatccgctttacgcagctgcgcacggcttttacggaagctagagtaagccgggtgcgtattcaggttagtgacataggcgctcacgctttctttgacagaactaaactgactgtaccctttcactttacctggcgcattggtacaacgtcctttcatgcatttcatgccgaacaggttgttgttgttgcgcgccagcttgctcgttccccaaccgctttctgctgcagccatcgtcgccaccatactggtggggataatgtctacgcgttcaagcaaggtattccacgggatttttcgcgtattaccggaccacttcaccttgtagcgtttggcgatgtctttcagacgcgcacgctcagcaggactccattggccctgatactgtttactaatgagccagttacgttccgcagtaatggccgcattttggctggtaatgtaaggcattacggtccggagaaacgcctttttccttggtgttccggaagggtattttcgcaaatcaggaagactactactctttgcactattgcgagaatactcttgtttactgcttacctgtttattactagctttagttaagtgggacttttgactcgctgttgttgtgtgcgtcttcgctaacacctcactgctaaacaccagagtgagtaacataagaatcatcgccccatatcgtcgtatgggagtcaaaatcatcaggtctcctggtcggatttaatcattccaacaccttatatttttcacaaatttgagagttgaatctcaaatcatatcaaaaatagctgtcaagagcaccccaaggaatagtccaaatctgaaactatgtcacgtgttaacgattcagattggcgctaaatcgcagaaaatgtgggggttatcgcaaaattcagccgttttttgcgcgagatcgctcacccttgcttctcatcctgtggacttaccgctcagggatgagttttgtttggcttatcgctggcaaactgtctgaaatcgcagcaataaggactcatccgccatgaaactcgccgcctgttttctgacactccttcctggcttcgccgttgccgccagctggacttctccggggtttcccgcctttagcgaacaggggacaggaacatttgtcagccacgcgcagttgcccaaaggtacgcgtccactaacgctaaattttgaccaacagtgctggcagcctgcggatgcgataaaactcaatcagatgctttccctgcaaccttgtagcaacacgccgcctcaatggcgattgttcagggacggcgaatatacgctgcaaatagacacccgctccggtacgccaacattgatgatttccatccagaacgccgccgaaccggtagcaagcctggtccgtgaatgcccgaaatgggatggattaccgctcacagtggatgtcagcgccactttcccggaaggagccgccgtacgggattattacagccagcaaattgcgatagtgaagaacggtcaaataatgttacaacccgctgccaccagcaacggtttactcctgctggaacgggcagaaactgacacatccgcccctttcgactggcataacgccacggtttactttgtgctgacagatcgtttcgaaaacggcgatcccagtaatgaccagagttacggacgtcataaagacggtatggcggaaattggcacttttcacggcggcgatttacgcggcctgaccaacaaactggattacctccagcagttgggcgttaatgctttatggataagcgccccatttgagcaaattcacggctgggtcggcggcggtacaaaaggcgatttcccgcattatgcctaccacggttattacacacaggactggacgaatcttgatgccaatatgggcaacgaagccgatctacggacgctggttgatagcgcacatcagcgcggtattcgtattctctttgatgtcgtgatgaaccacaccggctatgccacgctggcggatatgcaggagtatcagtttggcgcgttatatctttctggtgacgaagtgaaaaaaagcctgggtgaacgctggagcgactggaaacctgccgccgggcaaacctggcatagctttaacgattacattaatttcagcgacaaaacaggctgggataaatggtggggaaaaaactggatcagaacggatatcggcgattacgacaatcctggattcgacgatctcactatgagcctagcctttttgccggatatcaaaaccgaaagtactaccgcttctggtctgccggtgttctataaaaacaaaatggatacccacgccaaagccattgacggctatacgccgcgcgattacttaacccactggttaagtcagtgggtccgcgactatgggattgatggttttcgggtcgataccgccaaacatgttgagttgcccgcctggcagcaactgaaaaccgaagccagcgccgcgcttcgcgaatggaaaaaagctaaccccgacaaagcattagatgacaaacctttctggatgaccggtgaagcctggggccacggcgtgatgcaaagtgactactatcgccacggcttcgatgcgatgatcaatttcgattatcaggagcaggcggcgaaagcagtcgactgtctggcgcagatggatacgacctggcagcaaatggcggagaaattgcagggtttcaacgtgttgagctacctcagcagccatgatacccgcctgttccgtgaagggggcgacaaagcagcagagttattactattagcgccaggcgcggtacaaatcttttatggtgatgaatccagccgtccgttcggtcctacaggttctgatccgctgcaaggtacacgtagcgatatgaactggcaggatgttagcggtaaatctgccgccagcgtcgcgcactggcagaaaatcagccagttccgcgcccgccatcccgcaattggcgcgggcaaacaaacgacacttttgctgaagcagggctacggctttgttcgtgagcatggcgacgataaagtgctggtcgtctgggcagggcaacagtaacttttccggcttcccgttcgtcagtacctcgggaagccgccaaccaggataaaatgtcagccctaatcagcgttgcaggataaagcaccgctcactcttcaacagaccgatttgcaccccagcaaatgtagcgttattgttaccttccttgctacagagttcgacagatatcccgctatgacattctccctttttggtgacaaatttacccgccactccggcattacgctgttgatggaagatctgaacgacggtttacgcacgcctggcgcgattatgctcggcggcggtaatccggcgcagatcccggaaatgcaggactacttccagacgctactgaccgacatgctggaaagtggcaaagcgactgatgcactgtgtaactacgacggtccacaggggaaaacggagctactcacactgcttgccggaatgctgcgcgagaagttgggttgggatatcgaaccacagaatattgcactaacaaacggcagccagagcgcgtttttctacttatttaacctgtttgccggacgccgtgccgatggtcgggtcaaaaaagtgctgttcccgcttgcaccggaatacattggctatgctgacgccggactggaagaagatctgtttgtctctgcgcgtccgaatattgaactgctgccggaaggccagtttaaataccacgtcgattttgagcatctgcatattggcgaagaaaccgggatgatttgcgtctcccggccgacgaatccaacaggcaatgtgattactgacgaagagttgctgaagcttgacgcgctggcgaatcaacacggcattccgctggtgattgataacgcttatggcgtcccgttcccgggtatcatcttcagtgaagcgcgcccgctatggaatccgaatatcgtgctgtgcatgagtctttccaagctgggtctacctggctcccgctgcggcattatcatcgccaatgaaaaaatcatcaccgccatcaccaatatgaacggcattatcagcctggcacctggcggtattggtccggcgatgatgtgtgaaatgattaagcgtaacgatctgctgcgcctgtctgaaacagtcatcaaaccgttttactaccagcgtgttcaggaaactatcgccatcattcgccgctatttaccggaaaatcgctgcctgattcataaaccggaaggagccattttcctctggctatggtttaaggatttgcccattacgaccaagcagctctatcagcgcctgaaagcacgcggcgtgctgatggtgccggggcacaacttcttcccagggctggataaaccgtggccgcatacgcatcaatgtatgcgcatgaactacgtaccagagccggagaaaattgaggcgggggtgaagattctggcggaagagatagaaagagcctgggctgaaagtcactaaaaattgcctgatgcgctacgcttatcaggcctacatgatttctgcaatatattgaatttggaagaatttgtaggccggataaggcgtttacgccgcatctggcataaacaaagcgcactgttccggcgttgagaaacgccggaaaacgtttcaaacaggctgctgccgtagccgatgccgctgcactttctcgacatccatgcactgcaacgcctttgtcgggcaggcttcaacacaggccggtcccgtctcccgatgccagcacagatcgcacttaatcgccctcgcctttttgcggctagaaacgacctccatcgcaccaaacgggcaagccagcatacagcttttacagccaatgcaacgtgtttgttcaacgaaaatatgcccatgttcgcggcttatcgcgtcaacagggcagacattcgcgcacggtgcatcttcacactgatgacaggctactgccgtggtccagcagtggtctttaatgacacgaatacgggaaataaactcgtctggactcaacgcagcgcaatcctgattctcatgatggctcactgcgcaagccacttcacaggtacggcaaccgatacatttcgtcgcatccgcaataataaaccggttcatgatcactcctttgcactaaaacagcagagtgccagagagcgcgtccctactgctttgatccaacgaaggaaatgttaaagttttggcacttgtccaaagcgttatgtgatcgcgcccaggtcatccctgacagtaaatcccagttcattagaaatagcctgcgcggtttcacgcagtggtttcaggagatttttctctcccacctgtttcagacgacttgtgctaaggctaatgctcacggcgtacggcacccgcccatgaatatcaaacaccggaacagcaatacaggagacgccgagttcgttttcttctctgtccatcgccgctccgctttcacgaatgtgcgccagttcgtcgaacatcgcgggcagctcggtaatggtattgcgggttaacggctggatctcatgctgatggctttcccagtaactcttcacgtagtccgggtgaccaaacgccatgtagatcttgcccattgcggaacagtagagcggcatatgctggccaatataggcacgggttcgcagcatcccggttgtgggttccagcttataaatcaaaatagcgtgatcgtcttcgcggctggagaagttaatggtttcaccagtggcgatgttcagtgcctcaagatgcggagcggcgatatgaatgatattcaggctagacagcgccttctgcccgacggcaataaatttggtggtcaggcgataactccctgcggcaggcgcggtggtcacatagccgcaggactgtaatccctgcaataagcgatggacggtactcttatttaaaccagccagctcgctaagatgcgccaacggacaaccgtttggatagttgctcaaaatctcaatcagcatcaacccgcgaaacagactctggcttccggctggacgctctttttcctgcgccatctcgttctctttttttcccatcacttctttccccattttgtcgcgtcctgatggtagcgcaaagtgtgccgtagttcacgatctcgacagataatttataaccaattgatttttatgtcttttgaaattcatcaatcagattgccttgttaaaaagtgatcgatatatttgaaatcaagtttcgcatattgaaattttaagccaaaaaagcgatcaaaaaaacaaggaagcctgggatgaaagtgacatttgagcagttaaaagcagcctttaatcgggtcttaattagtcgcggcgttgacagcgaaacggctgacgcctgtgcagagatgttcgcccgcaccaccgaatccggcgtttattctcacggcgttaatcgtttccctcgtttcattcaacaactggaaaacggcgatatcattcctgatgcccaacccaaacgtataaccagcctcggcgcaattgaacagtgggacgcccagcgtagcatcggtaacctgacagcgaaaaagatgatggatcgcgccattgaactggctgccgatcacggtattggtctggtggcactacgtaatgccaaccactggatgcgcggcggcagctacggctggcaggcggcggaaaaaggctatattggcatttgctggaccaactccatcgccgtaatgccgccgtggggcgcaaaagagtgtcgcataggcactaacccgctgatcgtcgccattccttccacgccgatcaccatggtcgatatgagcatgagcatgttctcttacggcatgttagaagttaaccgtctggcaggtcgtcagctcccggtcgatggtggctttgatgatgagggcaatttgaccaaagaacctggcgttatcgagaagaatcgccgcattttgccgatgggctactggaaaggttctggcatgagcattgtgctggatatgatcgctactctcctttccgacggcgcatccgttgccgaagtcacccaggacaacagcgacgaatacggcattagtcaaatttttattgccattgaagtggacaagcttatcgacggtcccacccgcgatgccaagctgcaacgcatcatggattacgttactagtgccgagcgtgctgacgaaaatcaggccattcgcttacccggccatgaatttactaccctgctggccgaaaaccgccgtaacggcatcactgttgatgacagcgtgtgggccaaaatccaggcgttatgaggagataagtcatgatttttggacatatcgcgcagcccaatccgtgccgtttgcccgccgccattgaaaaggcgctcgattttctgcgcgctaccgatttcaacgccctggagccgggcgttgtcgaaatcgacggcaaaaatatttatacgcaaattatcgatttaaccacacgcgaagcggtggtaaaccgtccggaagtgcatcgtcggtatatcgatattcagtttctggcgtggggcgaagagaaaatcggcattgctattgatacgggaaataataaagtcagcgaaagtctattagagcagcgcaatattattttttatcacgacagtgaacatgaaagttttatagaaatgataccgggcagctacgcaattttctttccgcaggatgttcaccgaccaggttgtattatgcaaacagcctctgagatacgaaaaattgtggttaaagtcgcattaacggcgctgaattaatcgaataatcgtctacgccagaacgcctgggtaatgttattgctctaactatattaataattcaggttgctgcacatgcgacttgaattatgacagacatagcctcaaggaatagctatgaaaaaaatactcgaagcaatactggcgattaatctcgccgtactttcctgtattgtatttataaacattattttaagatatggttttcagacaagcattttatctgttgatgaattgagtcgttatttatttgtctggttaacgtttattggcgcgattgtagcttttatggataacgcccacgttcaggtcacctttctggtggagaaactctcccccgcatggcagcgacgagtcgctctggttacccattccttaatcttatttatttgtggcgcactggcctggggcgcaacgctaaaaacaattcaggactggagcgattatagtccgatcctcggtttacccatcggcctgatgtatgccgcttgtctgcccaccagcctcgttatcgcattctttgaactgcgtcatttatatcaactcatcacgcgtagcaattctctaacgagcccaccgcaaggagcttaatcatggctgtgctgatttttctgggctgtctgttgggtggtattgctatcggtttgcctattgcctgggcactgttgttgtgcggggcggcgttaatgttctggctggacatgtttgatgtccagatcatggcacaaacgctggtgaacggagccgatagcttctccctgctggcgattccgttctttgtgctggcgggtgaaatcatgaatgcgggcggcttgagtaaacgcattgttgacctgccgatgaaactggtggggcataaaccaggcgggctgggctacgtcggcgtgctggcagctatgattatggcgagcctttctggttctgccgttgcggataccgccgccgttgccgctctactggtgccgatgatgcgcagcgccaactatccggtcaaccgggcggcggggctgattgcctctggcggcattatcgcgccaattattcccccttccattccgtttattatcttcggcgtttccagcggattatccatcagtaagctgtttatggcgggcattgcccctggcatgatgatgggcgcaacgctgatgcttacctggtggtggcaggccagtcgccttaatttaccccgccagcaaaaagcaacgatgcaggaaatctggcactcttttgtctccggtatctgggcgctgtttcttccagtcatcattattggcgggtttcgctccggcctgtttacccctaccgaagccggggccgttgctgctttctatgcgctgtttgtcgccacagttatttaccgtgaaatgaccttcgccacactttggcatgtactcattggcgcggcgaaaaccaccagtgtggttatgtttctggtggccagcgcacaagtttccgcctggctgattaccattgctgaactgccgatgatggtttctgatttactgcaaccgttggtcgatagtccgcgtctgctgtttatcgtcattatggtggctatcctgattgtcggcatggtcatggatttaacgccgacggtattaattcttaccccggtattaatgcctttagttaaagaggcaggaatcgatccgatttatttcggtgtcatgtttatcattaactgcagtatcggcttaattacaccgcctatcggtaatgtacttaacgttattagtggggtggcaaaactcaaattcgatgatgcagtcagaggcgttttcccttacgtcctggttttatatagtttattagtcgtatttgtttttattcccgatctcatcatcctccctttgaaatggattaattaaaaggaaaatattatgaaattacgctctgtaacctacgcattattcattgctggcctggctgcattcagcacatcttctctggcggcacaatctttacgtttcggttatgaaacaagtcaaaccgacagccaacatattgcggcgaaaaaattcaatgatttattgcaggagagaaccaaaggcgagctgaaattaaaactgttcccggacagcactctcggtaacgcgcaggcgatgatcagcggcgtacgtggcggcaccatcgatatggaaatgtccggcagcaataactttgccgggttaagtccagtgatgaacttgcttgatgtccctttcctgttccgcgataccgctcacgcgcataaaacgctcgacggcaaagtcggtgatgatctgaaagccagtcttgaaggtaaaggactgaaagtactggcctactgggaaaacggctggcgcgatgtcaccaacagccgcgcaccggttaaaacccccgccgacctgaaagggctgaaaatccgcaccaacaatagcccgatgaatatcgccgcattcaaagtctttggcgctaacccgatcccgatgccgtttgccgaagtctataccgggctggaaacccgcactatcgacgctcaggaacacccgatcaacgtcgtctggagtgcaaaatttttcgaagtgcagaagttcctttctctgacgcaccacgcctattccccgcttctggtggtgatcaacaaagcgaagtttgatggcttaagtccggagttccagcaggcgctagttagttctgcacaagaagcgggtaactatcagcgcaaactggttgctgaagatcagcaaaaaatcatcgacggcatgaaagaagcgggcgtggaagtcatcaccgatctcgaccgcaaagcctttagcgacgcactggggaatcaggttcgcgacatgtttgttaaagatgtgccgcagggagctgatctgctgaaagccgtggatgaggtgcaataaaccatgacgcaatactggctggggttagattgtggcggtagctggctgaaagccgggctgtatgaccgcgaaggccgggaggcaggcgtgcagcgcctgccgctgtgcgcattaagcccgcagccaggctgggcagagcgcgatatggcagaactgtggcaatgctgcatggctgtcattcgcgccctgcttactcattctggtgttagcggggaacaaattgtcggtatcggcatctccgcacagggaaagggcttgtttttgctggataaaaacgacaaaccgctcgggaatgctattttgtccagcgaccgccgggcgatggaaatcgttcgtcgctggcaggaagatggcatcccggaaaaactctacccgctgacccgacaaaccttgtggaccgggcatccggtgagcctgttacgctggctgaaagagcacgaaccagaacgctacgcgcaaattggctgcgtgatgatgacgcacgactacctgcgctggtgtttaactggcgtcaaaggctgtgaagagagcaatatttccgagtccaacctctacaacatgagtcttggggaatatgacccgtgcctcaccgactggctggggatcgctgaaatcaatcacgccctgccgcctgttgtcggatctgccgaaatctgcggggagatcaccgctcagacagccgccctgaccggtctgaaagcgggtacgcccgttgttggcggcctgtttgatgtggtttccaccgcactctgcgccgggatcgaagacgaatttaccctcaatgcggtgatggggacctgggcggtgaccagcggcataacccgcggtttacgtgacggtgaagcgcatccgtatgtctatggtcgctacgttaacgatggtgaatttatcgttcacgaagccagccctacctcttccggcaacctcgaatggtttaccgcacagtggggagaaatcagctttgatgagatcaatcaggccgttgccagcttgccgaaggctgggggcgatctctttttcctgccgttcctgtacggcagcaacgccggactcgagatgaccagtggtttctacgggatgcaggccattcacacccgcgcgcacctgttgcaggccatctatgaaggggtggtgttcagccatatgacccacctcaaccgaatgcgcgaacgttttactgatgttcacaccctacgcgtcactggcggcccggcgcactccgatgtctggatgcaaatgctggcggacgtcagcggtctgcgtatcgagctgccgcaggtggaagaaaccggctgctttggtgcggcccttgccgcccgcgtcggcaccggggtttatcacaacttcagcgaagcccaacgtgacttgcgacacccggtgcgcaccctgctgccagatatgaccgcccatcagctttaccaaaaaaaatatcaacgttatcagcatctcattgccgcacttcagggctttcacgcccgcattaaggagcacacattatgagccgaccacttctgcaactggccctcgaccacagtagtcttgaagccgcgcagcgcgacgtgacgctgttaaaagacagcgtcgatatcgtcgaagcgggcaccattctctgtttaaacgaagggcttggcgcggtgaaagccttgcgcgaacagtgcccggacaaaatcatcgttgctgactggaaggtcgccgacgctggtgaaacgctcgcgcaacaggcgtttggcgcaggcgctaactggatgaccatcatctgcgccgcgccgctcgcgacggtagaaaaaggccacgcaatggcacaacgctgcgggggtgaaattcagatagagctgttcggtaactggacgctggacgacgcccgcgactggcatcgtattggcgtgcggcaggccatttatcatcgcggtcgtgatgcacaggccagcgggcaacagtggggcgaagccgatctggcacgcatgaaggcgcttagtgatatcggccttgagctttccattactggcgggattacccctgctgacctgccgctgtttaaagatatccgcgtgaaagcgtttattgccgggcgggcactggcaggcgcggcaaatccggcgcaagtggctggcgatttccatgcgcaaatcgacgctatctggggaggtgcgcgtgcgtaatcatcagttagggatttatgaaaaagcgctggcgaaagatctctcctggccggagcggctggtgctggcaaaaagctgcggttttgattttgtcgaaatgagcgtggatgaaaccgacgaacggctcagtcgtcttgactggagcgccgcacaaaggactagcctggttgccgcgatgatcgaaacaggtgttgggatcccgagcatgtgcctgtccgcacatcgtcgctttccctttggtagccgtgacgaggcagtgcgcgaacgggcgcgggaaatcatgagtaaagcgattcgcctggcgcgcgatctcggcattcgcaccatccagctggcaggttatgacgtctattacgaagaccacgacgaaggcacccggcaacgttttgctgaagggctggcgtgggcagtcgaacaggcggcggcaagtcaagtaatgctggcggtggagattatggataccgcgtttatgaactccatcagcaaatggaaaaaatgggacgagatgctcgccagtccgtggttcaccgtctacccggacgtcggcaacctcagcgcctggggcaatgatgttcccgccgaactgaaactgggcattgaccgtatcgccgcgatccacctgaaagacacccagccagtcaccgggcaaagtcccggacagttccgcgacgtgccgtttggcgaaggctgcgtcgatttcgttggcatcttcaaaacgctgcataaactgaactatcgcggttctttcctgattgagatgtggaccgaaaaagccaaagagccggtgctggagattattcaggcgcggcgttggattgaagcgcgtatgcaggaggctggatttatatgttaacgtaaatgcaggaggctggatttatatgttagagcaactgaaagccgacgtgctggcggcgaatctggcgcttcccgctcaccatctggtgacgttcacctggggcaatgtcagcgcggtagacgaaacgcggcaatggatggtaatcaaaccttccggcgtcgagtacgacgtgatgaccgccgacgatatggtggtggttgagatagccagcggtaaggtggtggaaggcagcaaaaaaccctcttccgatacaccaacgcatctggcgctctaccgtcgctatgccgaaattggcggtattgtgcatacccacagccgccacgccaccatctggagtcaggccgggctggatctccccgcctggggcaccacccacgccgattatttttacggtgccatcccctgcacgcgacagatgaccgcagaggagattaacggcgaatatgaatatcagaccggcgaagtgatcattgaaaccttcgaagaacgtggcaggagtccggcacaaatcccggcggtgctggtgcattctcacggcccgttcgcatggggtaaaaacgccgccgatgccgtgcataacgccgtagtactcgaagaatgcgcctatatgggtctattcagccgccagcttgcgccgcagctccctgcgatgcaaaacgaactgctggataagcactacctgcgtaagcatggggccaatgcctattacgggcagtaatccctcacgccggggcttcatcgccccggcactacgaattgatatgttccttgctgtaacgccgcttccacgctgctggcgttaaaccagtatgtttctgaaaaatctgccggaaatagccaacgtcattaaaccgtattgcatggagcaggccgacaacgtcgagtcactgcataacctgttgctgcccgccgatgcgccatttacgacatttgaaggcaagggattgttcagccataagatcctgattcagacgccaggttcccggtatgaacagagcaatccagagcaacaacctttgtggcattacgacggagcaccagccgcaccgacatccaccggtgaattaaaaacgccagctcaccccggtgacaaaggtaaaactctcattacgatcaatcatcgggctgtcggtaatctcttccggcagctcgctgtatcctgcgctcgccatcaatacgacgtgctctcctatcgggtattttgccgtcaggctgacatagggcacccaggcatcctgcgcggaataacttgccagaccgctacgacgggactcactctcactaatgccatagtaatagtcactgaaattctcgtcataatagagaacgcccagcgcaggtgtcaggctcagacgacctatctgcattttgtggaatacgcttagctcccccacccagccgttgctgttatccagaacgtccgcagctgcagaggctttcacggttccccaacgctcgtggtgataccaggcaacccccgccatagccgtactatcacgcttatcaagctgttgcatggcataatcgtcattatcggtagggtcaaattccagcggcatccaggatgcggtcaggctaagttcatttttttcactttggctcagaataaaacctaacgtggtctgacgaacataaaaagtatcaccttcataactaatcagcggaattgccttcgtattttcattataaccgcgataagggctttcattataagccgcaccagcaccaatggataattcagaagcagttgcgcttgccataaaaggcaacgcaaataacgccacaatattgcgattaattaacatgtccggtattccattttaaaataagataaaaaagagtcggcataataatgcttacaatttctccggtgcaagattcatatttatatagtaatatataaaattatatataattgggctgttgcgatgacaaaattacaacttaagtaccgggagttaaaaattatcagcgtaatcgctgccagtgaaaatatcagccatgccgcgactgtacttggcatcgcacaggccaacgtcagcaaatatcttgctgattttgaaagtaaagtgggtttaaaagtctttgaccgaaccacccggcagctgatgctcacaccttttggcaccgcgctgttaccgtacatcaacgacatgctggacagaaacgagcaacttaataattttattgcagattataagcatgagaaacgtggtcgggtcaccatctacgccccaaccggcataattacctatttatccaaacatgtaatcgataaaattaaagatatcggtgatatcaccttaagcctaaaaacctgcaatcttgagcgtaatgccttttatgaaggcgtcgaatttcctgatgattgtgatgttttaatcagctacgctccaccaaaagatgaaagcctggttgccagttttattacccaatatgccgtaaccgcttatgccagccagcgctatcttgagaaacatcccattagccgtcctgacgaactcgaacatcactcctgtattttgatcgacagcatgatgatcgacgacgcgaatatctggcgcttcaacgtcgccgggagtaaagaggtgcgggattatcgcgtgaagggaaattacgtttgcgacaacacgcaatctgcgctggagctggcacgaaatcacctggggattgtgtttgcgccagacaaaagtgtgcagagcgacctgcaagacggcacgctggtgccctgctttcagcaaccctatgaatggtggctggatctggtggctatcttccgtaaacgggaataccagccctggcgggtccagtatgtgctggatgaaatgctgcgtgaaattcgccaccagcttgctcagagccagcaactgcggcctgaacaagcggcggaaagcgaagattaatgatcgagataaaggtaatgcacccagctggtcatgcgtaatagcactttgcgcatcacgctgacatggctgaaatgatcagagtaaaccgccacctgggcgtaaataccgtctggtaaagcgctcaaatcagtgtgctcatccagttcaatggtcgcgataacgccatcactacccggcgctgtgtttaacgtctgtaaggtgccggtgctctgataagctccgccgggaacggctggactaatggctgccagcttaccgctgaataccttacctggcagagcattaaacaccacttccgcatcgtcgccaggagccagtcgcagcaaggagttctgacggaactgcgccacgatttgtcgtttctgatcgggtataaacaccatcaccggacgtagcggcaggctcgcggcataggtacccggacgaatcagtacctgggtcacataaccatcgctcggcgcacgcactatcgtctgctcaaggttatattttgcttccgcgagctgtgctttcaggctggcgatttgagaatgttcacccaacaccaggctatccagctggctctggatctgtttttgttccgccgcgctactcttcacggaggcttcctgcgccagataattttgccgcgccacatcgatatcgcgttcactaaacgggtttactttcgcctggctgccacgtgcgtaacgctgatactctttagcgaatttatcccgcgtggcctttgcctgctgagtattcgccgccatctcatctaactctgcgcccaacgcccgctgtttatgttctgcggtaacgatatccgccatcagccgatccacccgcgcctgataacgcgtcgggtccagtcgaaatagcacctcaccttttttaatcagcgtatttttcttatccgtcacttcaatcaccacaccagtcacctgtgggacaacaggaatagaaataaccgctttttgcgctttaaaggtatacggatggttatagttcattaacagaattagaccgctgacaataaatattccacccagggccgctgtgggaatggtccatttatttacgggaattttgaagatcttaaacattgcccatgcaaaagccacataggtcaaaataatcagtaaatccataagtattactcggcagaagaggatttgatgtcggcgagctgtttctccagcccggcaatgcgctgttgcagttgcataacggaactatcatggctttgcattccccatccccgctccgggcggtaaagcgtggcccaaatccacaaaaacggccagataacatgtaacgtaaaaagactcacccaaccagcaacatgaatggcgtcggcatgaggatgattacgttttttggcaatcaggtagggaatatcatgtaaaataatgatcccatagaagatcaccagaaatacaaaaataagcactcccagtgcaaaatagtccaggaacatatttccctcaaagaatataaaaaagaacaattaacgcatattatgaaatgccatgatgcagtgcaatttccttatttatataacgacatattgttttttatatactttcttaaatgtgctgtctggtttttcaacaggacgaggtttatcatattgaaatagtggaactattggccaaactaatgaataactccagtaaaacatccacagtacagattaagcgtattaaaccttcaattatctaccgtttattgctgattggcctcggatcaccaatggtgatttacggcctggttcgcccgctcaccatcgaaacgcgagattaaactcctgacaaaacacgccccagaaacgtacttctgttggcgtagtctgggttattgcgcacgtaggtttaaaacgtaaattgtaacaacgtgcgctttgtttatgccggatgcggcgtgtacgccttatccggcctacggtcaggttcccgtaggcatgataagacgcgtaagcgtcgcatcaggcaatgaatacccaatgcgaccagcttcttatatcagaacagccccaacggtttatcgctgtagctcaccagcaggcacttggtttgctggtaatgctccagcatcatcttgtgggtttcgcgaccgataccactttgtttgtagccaccaaacgccgcatgtgccgggtaagcgtgataacagttggtccacacgcgcccagcctgtatgccgcgccccatcttataggccagattaccgttgcggctccagacgcccgcgcccaggccatattgcgtatcgttcgccagctccagcgcttcttccatcgttttgaaggtggtcaccgccagcaccgggccaaaaatctcctcctggaacacccgcatattgttctgaccaaacagaatcgtcggttcgaggtagtagccgtctttcagttcaccttccagcagcttgcgccgcccgcctgtgagcacgtcagcgccctcttttttaccgatatcaatgtagttgaggatggtttccagttgcccgtgagaaacctgcgcgcccatttgcgtcacgctgtcgagcgggttaccgctacgaatgctttcgacacggcggatggcgcgttccataaagcgttcgtagatagattcctgcactaaagcacgactcggacaggtgcaaacttcgccctggttaaaggcaaacagtgcaaagccttccagcgctttatcgaaaaaggcatcttcttcatccatcacatcagcaaagaagatatttgggctcttaccgcccaactccagcgtcaccggaataatgttttgcgttgcgtattgcataatttgttggcccacttccgtactgccggtaaacgccactttggcgatgcgtttgctggtcgccagatattcgccaattaccccacctgcgccattgaccacgttcaccacgcccggcggcagtaaatcaccgacaatttccattagcagcagtacagaaagcggggtaagacgtgcgggtttcagcaccacacagttgcccgccgccagcgcgggagccattttccagctcgccatcagcagcgggaagttccacgggataatctgccccaccacgcctaacggttcatggaaatgataggccacggtttcgctatcaacttcactgatcccaccttcctgcgcccgaatacagctggcgaaatagcggaaatggtcaatcgccagcggtacatccgcagcactggtttcgcgaatgggtttgccgttatcccaggtttcagctgtcgctaacagctcgaggttttgttccattcgatcggcaatcttaaacagaatcgccgcacgatcctgcacgctggtgtgcgcccatttatctttcactttgtgcgcagcatccagcgccagatcgatgtctcgtttgccgctagacgccacttcgcacagcagctgcccggtcaccggcgtcagattctggtaatactcgccgtcggcaggggctacccattcgccgccaataaagttgtcatagcgggcttttaacttgagggggaaaccatactcgccgggcttaatctgtgcactagggggattattggtcatgatcgtctccttgcggtgtgaggtataacaagggtagacgtgactggcgaaatcttcgccagtcggtaacagctttacgacagctatcacgaatttacgggcaagggttacagagatagttgaaaaagcggctaacaatttgccagccgttgtggaaatgatgattacatcgctgcgcgataaatcgccacaatttcttcgtgagttgcctggatcgggttagtaaagccacaggcatctttcagggcattagtcgccaataccgcgaaatcttcttctttcacgttcaggtcgcgtaggcctgccgggatatccactttcttcgccagttcacggatggcgttaatgcaggcttcagcaccttccgcgtcgtttttacctgtcacgttcacgcccattgcagcggcacagtcacgcagacgtgcagcggcgactttgctgttgaatacctgaacgtgcggcagcaaaacggcgttacatacaccgtgtggcaggttgtagaaaccgcccagctggtgcgccatcgcatgaacataacccagagaagcattattgaacgccataccggcgaggaactgggcataagccattgcttcacgcgctttcgcattactgccatcttcaacggctaacggcaggttttcggcaatcatggtcacggctttcagtgcacaagcgtcagtgatcggcgtggcggcaatagaaacatatgcttcgatagcgtgcgttaaggcatccatacccgttgcggcggtcagactcttcggcataccaatcatcagagaggagtcattgacagaaagcagcggagtgacatgtttatcaacaatcgccattttgatatgacgcgcttcgtcagtgatgatgcagaaacgggtcatttcagaggccgtacccgccgtggtattgatggcgatcatcggcagctgcggttttgcagagcggtcaacgccttcgtaatcgcgaatatcgccgccattggctgccaccagcgcaataccttttgcgcagtcgtgtggagaaccaccgcctaaggagatcacgctatcgcaattattctctttaagtaatttcaaacctgcggcgacgttttccgtggtggggttaggttgggtgccatcataaataacgctaaaaatattgcgttcttccagtgctttttgcacatcgcccgccatacctaatttcgttaacatattgtcagtgacaattaaggtacgggtaaatccataatctgccatcatattcattgcatcagtcaaactatcagcgccgatgacattcacagaaggaataaagaacgtactagctgccataacacactcctgaaagtgtaaaaaagggcgggcagcttactgaggattttcattcgaaaatatgatcagtattattgattatcaaaattaatctaataaaaagcacattgtattcattaaacaatgtgctttttttaaattcataagaattttgtattaatttattttaaaacttaattaatcatttccttatttttccggaaataataatgcgtcgcgcaataaatgatcatttccacgacgacgcgtaaagccaatgcggtcaaaatattccagaatctgaattgccagctttcggcctacgcctaagcgatcgcggaaatccgccgcgcaggtactaccacactcctgatcgagatcgcggatcatattggcaaactcgacaatccgatcgttacggtaataacgatctttaacgatcgcggtaattattccttgctgcgccgcctggcgtagagtcaggcgcattgcctgctcgtcggttcccgtctcttttgccaggtcacgcacccaccacggttcgtcaccaaacagtggctctgctttttgccagatggcctgctgctcttcgctgaagcccgctttgtgatctggcagatgcagccagccgtgatggctgtggatgtcgccgctttcgcgcatcttttcaatcagcaacagtaccagcgcttcatcttccattggcaacgccatacgtcgcagacgttcgcgcccagggccaggttcatcgcgatgttgctcatgataagtcgctaatgtgtcgagaattttccgctgccagcgggcggcaaccggcgcattcaacaagctataaccagcctgaatataaccaggctgttgcagcaattcgcgcatcccttcgccgttgagctggcgcgcccaggcgaaatccgcaaggttaaccgcgccgcgttccagatgaacagataacgcatcggcatcgctctgcgcccgtgcaagagacgccagccattgcagatattccggcttacgtttaccgcgacgcggcgggttaagcatcacgacgcgcgctccggccagcgtgttgcgggcagagatatcgcgcaataccaggcggtcgttatctgccagccataacggggtgtcgaagaccagttcagcaaggttatcttccagcagactaacgcgtcccgtgacgtggctggcggcgtggtgaatatgcagcggctgccactgggtcagcggtgtatgggtttgaagctcgacaatcacccgtgtgaacggctctggcggcacatcggcaagcagccagtcgccacggttaatctgctctttttccgcatcacccgcgatgttaagcgcgatacgctgcccggcattggcggtttctgttggctggttttgcgcatgcagcgcacgtacacgcatcggtttatttacaccagtcagccagagactatcgcctaccttcacttccccgcttaacgccgtaccggtgacgaccagcccggcaccttttacggtaaatgcgcggtcaatcgcgaggcggaaactatgttggctggcgtgctcgcgttccggcaactgaagcagatgctcgcgcagggcatccattccccgaccttcggttgctgcggtgataaacagttttgcctcagcaaaaccgtattcccgcagaacctcctttacctggcgttcaacctcatcaacacgcgcttcgtccacgcgatcggctttggtcagcgccactgtcagcatcgggttaccggtcagctgcaaaatcgccagatgctcacgggtctgtgccatcacgccgtcatcgcacgccaccaccaacagcgcgtgatcgataccaccaacgcccgccagcatgttggaaagaaacttttcatgaccgggaacgtcgataaaaccaggcacgcgaccatccggctgcggccagtaggcatagccgagatcgatggtcatgccgcgctttttttcttccggcagacggtcagcatttacgccagtaatcgcctgcaataaggttgttttgccgtggtcaacgtgtccggcagtcgcaataatcatttcaacaacatctccaaaaaccgttgctcatcttcaaggcagcgtaaatccagccacaatcgtccgtcataaatacgaccaatcaccggcactggcaattcacgccagcgggcggctaaactctcaaggtggctaccgcgtccatcatggggtgtaaacgttaatgccgcgctcggcaggcgatcaaccggcaggctaccactgccaatctggctaagacatggcataacctgtaccgcaaactccgcgccgtaatgtgcggcaaggggggcctgtaaacgttgtgcctggatttgaatgacctctgcgctgcgggtaagcaggcgcagggtcggtaatttttcactcagagcttcagggtgtaaataaagacgcaacgtggcttccagcgccgcgagggtcattttatccgcgcgtaatgcacgcttcagcgggtggctttgcaggcgggcgatcatctcttttttaccaacaataattcctgcctgcggcccgcctaacaacttgtcgccggagaaactcaccagactgacgcccgccgcaatcaactcctgcggcattggctctttcggcaaaccgtactggctaagatcgaccaggctgccactgcctaaatcagtcactacgggaacatccagctctttgccgagcgccaccagttccgcttcatctatcgctttggtgaacccctgaatgctgtagttactggtatgtactttcatcaacagtgcggtattttcattcaccgcctgacgataatcattcgcgtgcgtgcggttggtggtccctacttcgtgtagggtgcagcctgcctgacgcataacatcgggaatacgaaacgcgccgccaatctccaccagttcgccgcgagataccaccacctcttttccgctggcagtggccgccaacatcaataacaccgccgccgcattgttattgacgatacaggcatcttccgcccccgtaatacggcacagcagctgcgccagcgcccgatcgcgatgtccgcgtccggcgtcgtccagatcatactcgagggtcactgggctacgcatagcctgcgcaacggcttccaccgcggcttccgcctgtaaagctcgcccaaggttggtatgcagcacggttcccgtcaggttgatcaccggacgcagcgcgctctgcgcttctttcgtcaaccgggcatcgacttcttgcgcccagttttcacaccacgcaggcagcgtctggctgccacgaatcacttctcgcgcttcgtcgagcatctgacgcaacaattccaccacgcgggtgtgaccataagtatcacgcaaagaaaggaaggagctatcgcgcaataagcgatcaatagccggaagttgactatagagggaacgcgtttcggttgtcataggaaacctggctgatcaaggccctctcacacggagaagggcgtttaacataaccacggattgtaacgtgagatgggtcaggaggacatatcgcgcatcaagcctttggcggttcggtgcgagcaaaactttcgcggctaaacaggttttcgaccagtttgactaagtgtgggcggtcgacacaccaacctggcgcaacgcggcggaaattgagatatccgacggcacaggcaatggcgatagtcgccagattgaccgtatcggttttgagtgtgccatcgaccagatatccttccagcacatccagactgcggttgattttctcccgctggcgtaacaattcatcttcagactgctgcgccgctggacgcgcctgttcacgcacgcttaccagcccggcatccataatgccatccgccagtgcctcaattttgcgcacccgcaagctctccagcggatcgcgcggcaacatcgccggagcgacattcattaattcaatatattcagcgatgatcgggctatcaaaccagcattcgccctcttcggtcaccagcaccggcacttttcctaacgggttaaattgcgccacgccgttgtccgcgttatagggcagttcattaataaattcgaaagttatgcccttttctaacaacagaatagaaagtttgcgtacaaacgggctggtgtagctaccgacgagtttcatgccgagtcctttgtgcgaggaaaaatatcagtatggctcaatgatccaaataaagataatgcatccagctggtcattcttagcagcactttccgcatcacgctaacatggctgaaatggtcggagtaaaccgccacctgggcgtagatgccgtcgggtaaggcatcgatatcatcgttagggtccagttcaatggttcccagcacaccgtccgtgccgggcacgaccgttaaactttgcaataccccctgcgcctgataagaaccgcctggcacgacaggtaaaatactagtcagtttgccgtgaaacacctgcccaggtagcgcgttaaacaccacttccgcatcatcgccaggtttcagacgtaacaggctgttttgccgaaattgggcgacaatttgccgtttttgctcggggatgaagaccatcaccggacgcagcggcaaggcagctgcgtatgtacctgggcggatcagtacctgagtaacgtagccattgctcggcgcgcgaatgacagtctgctcaaggttatattttgcttcagtaagttgcgctcttaagctcacaatctggctttgctcgccgttaaccatactgtcgagctggctctggatctgcgcctgctccgccacgctgcctttcaccagcgcatcctgcgcgaggaaattttgccgcgcatcgtcgatgtcacgttcgctgaacggattcaccgccgcctggctgcctttcaagtaacgttgataatttttaaacagacggtcgcgctccgcactaacctgggtggtgttggcctgcgcttcagtgagctgcgcacgcagcgtctttatattatgcgtcgccgtcatcaggtcagcctgaagtctgtcaactcgcgcctggtaacgaaccgggtcgagcttaaaaagcacctcgcccttttgaataagctgattattcttgtcagtgacttcagtaacaattcccgtcacctgtggcgtgatagggatcgctatcactgccttttgcgcggtaaaagtgtaagggtggttgtagttcatcaacaaaatcaaaccactcaccagaaacacgcctcccagcgccgccgtcgccagcgtccactgatttaccggaatgcggaagattttaaagaccgcccacgccagcgccacgtaagttaaaacaatcaatagatccataattagatctccgggaacgtggaatagtcagtctttttctcggcggcgagttgatgctccaaccgggaaattcggtcagaaagtgcggcgatttccgggtcagtcgctttctcctggctcgcaacatgactctgcataccccagccacgctccggttgatagagcgtcgcccagatccacagaaacggccagataacatgcagagtaaacaggctcacccagcccgccgtatgaatagcgtcggcatggggatggttgcgctttttggcaatcagataagggatgtcatgtatcgcgatgattccataaaaaatcaccagaaagacgaagatcagcactcccaacgcgaaatagtttagaaacatatctgcctcggattcacgtttatcagtgttgtttttgggctggcagccagaagggagtcaggctgatattttgacaataatccgggttcgcgattctcgccataacaccaaagaataatttttagaggtgatgagttgcttagttacataacgattgtatgacgaaggcataacatgctgtagatcacatcaggtgaacgccgtaagaaaatatcttgtgattcagatcacaaagattcaacaaaccatcaaaacaaaaatgtgacactactcacatttaaatgccatttttagcgaaaatcgccgccttgttgcttttttacacaagcgttttgtgatgaacgtcacgtcaattacctctctaccccctatatttatgtgattgatatcacacaaaaggccgtcgactggacagttaaccgattcagtgccagatttcgcagtatctacaaggtccggctacctctgccgccacattaacaaaaaacctcgggcttccagcctgcgcgacagcaaacataagaaggggtgtttttatgagttccgatattaagatcaaagtgcaaagctttggtcgtttcctcagcaacatggtgatgccaaatatcggcgcgtttatcgcgtggggtatcatcaccgcgttatttattccaacagggtggttaccgaacgagacgctggcgaagctggtcgggccgatgatcacttatctcctgccgctgctgatcggttataccggtggtaagctggtaggcggcgaacgtggcggcgtagtcggtgccatcaccaccatgggcgttatcgtcggcgcagacatgccgatgttcctcggttctatgattgcaggtccgctgggcggctggtgcattaagcacttcgaccgctgggtagacggtaagatcaaatccggttttgagatgctggtgaataacttctccgcaggcatcatcgggatgatcctcgctattctggcattcctcggcattggcccgattgttgaagccctgtccaaaatgctggctgcgggcgttaacttcatggttgtccatgacatgctgccgctggcgtctatctttgttgaaccggcgaaaatcctgttcctcaacaacgccattaaccacggtatcttcagcccgctgggtattcagcagtcccatgaactgggtaaaagtatcttcttcctgattgaagctaacccaggtccaggtatgggcgtgctgctggcgtacatgttctttggtcgtggtagcgctaaacagtctgcgggcggtgcggcaatcatccacttcctggggggtatccacgaaatctacttcccgtatgtgctgatgaatccgcgtctgatcctcgcagtcatcctcggcggtatgactggcgtgttcacgctgactatcctgggcggtggtctggtttctccggcatctccgggttctatccttgctgtactggcgatgacaccaaaaggtgcttacttcgctaacatcgcgggtgtgtgtgcggcgatggctgtctccttcgttgtctctgctattttgctgaaaaccagcaaagtgaaagaagaagatgatattgaagcagcaactcgtcgtatgcaggacatgaaagctgagtctaaaggcgcatctccgctgtctgctggcgatgtgactaacgacctgagccacgtacgtaaaatcatcgttgcctgtgacgccggtatgggttccagtgcgatgggcgcaggcgttctgcgtaagaaaattcaggatgcaggtctgagccagatttctgttactaacagcgcgatcaacaacctgccgccagatgtggacctcgtcatcactcaccgtgacctgaccgaacgcgctatgcgccaggttccgcaggcacagcatattagcctgaccaacttcctcgacagcggcctgtacaccagcctgaccgaacgtctggttgctgcccaacgccacacggcaaacgaagagaaagtaaaagacagcctgaaagacagctttgacgattccagtgctaacctgttcaagctaggcgcggagaacatcttcctcggtcgcaaagcggcaaccaaagaagaagcgattcgttttgctggcgagcagctggtgaaaggcggttacgttgagccggaatacgttcaggcgatgctggatcgtgaaaaactgaccccgacttatctgggtgagtctatcgcggtgccacacggtacggttgaagcgaaagatcgcgtactgaaaacgggcgtcgtgttctgccagtacccggaaggcgtgcgcttcggtgaagaagaagatgacattgcccgtctggtgattggtattgctgcccgtaacaacgagcacattcaggttatcaccagcctgaccaatgcactggatgatgagtccgtcatcgagcgtctggcacacaccaccagcgtggatgaagtgctggaactgctggcaggtcgtaagtaatccaatcccaccctctccacatggagaaggtggggttaattgcctgatgcgctacgcttatcaggcctacaggatgcatcacaatttgttgaatttgcacgttcttgtaggccggataaggcgcttacgccgcatccggcgctgcccctctcctcacggagagggtttgggtgagggaaaagcctcaccccagccctctcgggtaaaaacattgatgaaggttaatactatgaaagcattacattttggcgcaggtaatatcggtcgtggctttatcggtaaactgctggcagacgcgggtatccaactgacgtttgccgatgtcaatcaggtggtacttgatgccctgaatgcccgtcatagctatcaggtacatgtggttggtgaaaccgagcaggtagataccgtttccggcgtcaatgctgtcagcagcattggtgatgatgtcgttgatctgattgctcaggttgatttagtcactaccgccgttggcccggttgtgctggaacgtattgctccggcaatcgccaaagggcaggtgaaacgtaaagaacaaggtaatgaatccccgctgaacatcatcgcctgtgaaaacatggtacgcggtaccacgcagctgaaaggccatgtgatgaacgccctgccggaagacgccaaagcgtgggtagaagaacacgttggctttgtcgattccgccgttgaccgcatcgtaccgcctagcgctagcgcaactaacgatccgctggaagtgacggtagaaaccttcagcgaatggattgtcgataaaacgcagttcaaaggcgcactgccgaacatcccaggcatggagttaaccgacaacctgatggcatttgtcgaacgtaaactcttcaccctgaacacgggtcatgctataaccgcgtacctcggaaaactggccggtcatcagaccattcgtgacgcgattctcgacgagaaaatccgcgcggtggtaaaaggtgcgatggaagaaagtggtgcagtattgatcaagcgctacggctttgacgctgacaagcatgcggcgtacatccagaaaattctcggccgttttgagaacccgtatctgaaagatgatgtagagcgcgtaggccgtcagccactgcgtaaactgagtgctggcgaccgtctgatcaagccactgctcggtacgctggaatatggtctgccacataaaaacctgattgaaggtattgccgctgcaatgcacttccgcagtgaagatgatccgcaggctcaggaactggcagcactgatcgctgacaaaggtccgcaggcggcgctggcacagatttccggtcttgatgccaacagcgaggttgtatccgaggcggtaaccgcttataaagcaatgcaataatggtggaccaggcgcaggacaccctgcgcccgaataacagattgagtgatatgcaggcaacaatggaacaaacccaggcctttgaaaaccgtgtgcttgagcgtctgaatgctggcaaaaccgtgcgaagctttctgatcaccgccgtcgagctcctgaccgaggcggtaaatcttctggtgcttcaggtattccgcaaagacgattacgcggtgaagtatgctgtagaaccgttactcgacggcgatggtccgctgggcgatctttctgtgcgtttaaaactcatttacgggttgggcgtcattaaccgccaggaatacgaagatgcggaactgctgatggcattgcgtgaagagctaaatcacgacggcaacgagtacgcctttaccgacgacgaaatccttggaccctttggtgaactgcactgcgtggcggcgttaccaccgccgccacagtttgaaccagcagactccagtttgtatgcaatgcaaattcagcgctatcaacaggctgtgcgaagtacaatggtccttagtctgactgagctgatttccaaaatcagcttaaaaaaagcctttcaaaagtaagcaacgtctgcttactgcccctctacctgcttcggccgataaagccgacgataatactccagacgttgtagatataacggcacgctttcatcgggtattccggacggaatcgcgttacggggaggaagttttttcagatactcccggaacgcctggctacttgccatgaaatctacggctttatcgataagaagcggaacgttttcacctaatttgcccatgatgatatctccgtattaccccgcgccgggaatgcgcggccgccaattttagtttaggttcccggtaaagatgacattaaggaaaacgtgctgaatcctcaataatcatccgctgctgtttattatcttttttctatagatttcttaattaatcaacgaattgcgcagtttttgagcatgttaatgattacgttacagaactattacaatgtcattagttgtgaacaaagcacctggtcgcgcatactaggggctataaatttatctttatcagaagccatcacatgaaagaagtcgaaaaaaacgaaatcaaacgcctcagcgatcgcctggacgccatccgccaccagcaggccgatcttagcctggttgaagccgcagacaaatatgccgagctggaaaaagagaaagccacgctggaagcagaaattgctcgcctgcgtgaagttcatagccaaaaactgagtaaagaagcacagaagctgatgaagatgccattccagcgcgcaattaccaaaaaagagcaggctgatatgggcaagctgaagaaaagtgttcgcggactggtcgttgtgcacccaatgaccgcactgggccgcgaaatgggcctgcaggagatgactgggtttagtaagaccgcgttttaagaacacagtatctacagggtgattctgcacattcctataggccgagtaaggtgttcacgccgcatccggcaagataaggcgctctggatcaacaacctaagggcaattctctgatgaggattgcccttttctttaccagacatctccccccacaagaattggccctaccaattcttcgcttatctgacctctggttcacaatttcccaattaaaactcacatcaatgttgccaatacataacatttagttaaccattcattgtcattatccctacacaacacaattggcagtgccacttttacacaacgtgtgacaaggagatgagcaacagactcattacacgatgtgcgtggactccaggagacctgcaatgaatctctggcaacaaaactacgatcccgccgggaatatctggctttccagtctgatagcaagccttcccatcctgtttttcttctttgcgctgattaagctcaaactgaaaggatacgtcgccgccagctggacggtggcaatcgcccttgccgtggctttgctgttctataaaatgccggtcgctaacgcgctggccagcgtggtttatggtttcttctacgggttgtggcccatcgcgtggatcattattgcagcggtgttcgtctataagatcagcgtgaaaaccgggcagtttgacatcattcgcagctctattcttagcataacccctgaccagcgtctgcaaatgctgatcgtcggtttctgtttcggcgcgttccttgaaggagccgcaggctttggcgcaccggtagcaattaccgccgcattgctggtcggcctgggttttaaaccgctgtacgccgccgggctgtgcctgattgttaacaccgcgccagtggcatttggtgcgatgggcattccaatcctggttgccggacaggtaacaggtatcgacagctttgagattggtcagatggtggggcggcagctaccgtttatgaccattatcgtgctgttctggatcatggcgattatggacggctggcgcggtatcaaagagacgtggcctgcggtcgtggttgcgggcggcagctttgccatcgctcagtaccttagctctaacttcattgggccggagctgccggacattatctctagcctggtaagtctgctctgcctgacgctgttcctcaaacgctggcagccagtgcgtgtattccgttttggtgatttgggggcgagtcaggttgatatgacgctggcccacaccggttacactgcgggtcaggtgttacgtgcctggacaccgttcctgttcctgacagctaccgtaacactgtggagtatcccgccgtttaaagccctgttcgcaagcggtggcgcgctgtatgagtgggtgatcaatattccggtgccgtacctcgataaactggttgcccgtatgccgccagtggtcagcgaggctacagcctatgccgccgtgtttaagtttgactggttctctgccaccggcaccgccattctgtttgctgcactgctcagcattgtctggctgaagatgaaaccgtctgacgctatcagcaccttcggcagcacgctgaaagaactggctctgcccatctactccatcggtatggtgctggcattcgcctttattagcaactattccggactgagtagtacactggcgctggcactggcgcacaccggtcatgcattcaccttcttcagcccgttcctcggctggctgggggtattcctgaccgggagcgataccagttctaacgccctgttcgccgcgctgcaagccaccgcagcacaacaaattggcgtctctgatctgttgctggttgccgccaataccaccggtggcgtcaccggtaagatgatctccccgcaatctatcgctatcgcctgtgcggcggtaggcctggtgggcaaagagtctgatttgttccgctttactgtcaaacacagcctgatcttcacctgtatagtgggcgtgatcaccacgcttcaggcttatgtcttaacgtggatgattccttaatgattgttttacccagacgcctgagtgacgaggttgccgatcgtgtgcgggcgctgattgatgaaaaaaacctggaagcgggcatgaagttgcccgctgagcgccaactggcgatgcaactcggcgtaagtcgtaatagtctgcgcgaggcgctggcaaaactggtgagtgaaggcgtgctgctcagtcgacgcggcggcgggacgtttattcgctggcgtcatgacacatggagcgagcaaaacatcgtccagccgctaaaaacactgatggccgatgatccggattacagtttcgatattctggaagcccgctacgccattgaagccagcaccgcatggcatgcggcaatgcgcgccacacctggcgacaaagaaaagattcagctttgctttgaagcaacgctaagtgaagacccggatatcgccagtcaagcggacgttcgttttcatctggcgattgccgaagccagtcataacatcgtgctgctgcaaaccatgcgcggtttcttcgatgtcctgcaatccagtgtgaagcatagccgtcagcggatgtatctggtgccaccggtttttagtcaactgaccgaacaacatcaggctgtcattgacgccatttttgccggtgatgctgacggggcgcgtaaagcaatgatggcgcaccttagttttgttcacaccaccatgaaacgattcgatgaagatcaggctcgccacgcacggattacccgcctgcccggtgagcataatgagcatagcagggagaaaaacgcatgattatttccgcagccagcgattatcgcgccgcagcgcaacgcattctgccgccgttcctgttccactatatggatggtggtgcatattctgaatacacgctgcgccgcaacgtggaagatttgagtgaagtggcgctgcgccagcgtattctgaaaaacatgtccgacttaagcctggaaacgacgctgtttaatgagaaattgagcatgccggtggcactggctccggtgggtttgtgtggcatgtatgcgcgtcgtggcgaagttcaggcagccaaagcggcggacgcgcatggtattccgtttactctcagcacggtttccgtttgcccgattgaagaagtcgcgccagccatcaagcgcccaatgtggttccagctttatgtactgcgcgatcgcggctttatgcgtaacgcgctggagcgagcaaaagcagcgggttgtagcacgctggttttcaccgtggatatgccgacaccgggcgcacgctaccgtgatgcgcatagtggtatgagcggcccgaacgcggcaatgcgccgctacttgcaagcggtgacacatccgcaatgggcgtgggatgtgggcctgaacggtcgtccacatgatttaggtaatatcagtgcttatctcggcaaaccgaccggactggaagattacatcggctggctggggaataacttcgatccgtccatcagttggaaagaccttgaatggatccgcgatttctgggatggcccgatggtgatcaaagggatcctcgatccggaagatgcgcgcgatgcagtacgttttggtgctgatggaattgtggtttctaaccacggtggccgccagctggacggtgtactctcttccgcccgtgcactgcctgctattgcagatgcggtgaaaggtgatatagccattctggcggatagcggaattcgtaacgggcttgatgtcgtgcgtatgattgcgctcggtgccgacaccgtactgctgggtcgtgctttcttgtatgcgctggcaacagcgggccaggcgggtgtagctaacctgctaaatctgatcgaaaaagagatgaaagtggcgatgacgctgactggcgcgaaaagcatcagcgaaattacgcaagatagcctggtgcaggggctgggtaaagagttgcctgcggcactggctcccatggcgaaagggaatgcggcataatcgtttgcgccccctcaccctaaccctctccctcagggagaggggaccgttcggcgctgtatgtactccctcactctgaaacgacaccgcactctttttttctccctcgcccctccggggagagggccggggtgaggggaaaaggccgcactgctcaccaattttctgctatcctgcccccgcactaagggggcagtatgctaaacatcgtactttacgaaccagaaattccgccaaatactggcaacatcatccgtctttgcgctaataccggctttcgtctgcatatcatcgaaccgatgggatttgcctgggacgataagcgcctgcgccgcgcggggctggactatcacgagtttaccgccgttacgcgtcatcatgactatcgcgcgttcctcgaagcagaaaatccccagcgcctgttcgccctcaccacgaaaggtacacctgctcacagcgccgtaagctatcaggatggcgattatctgatgttcggcccggaaacacgcggcctgccagcgagcattcttgatgccctgcccgctgaacaaaaaattcgcattccgatggtgccggacagccgcagcatgaatctgtccaatgcggtgagcgtagtggtgtatgaagcctggcggcagttggggtatccgggagcggtattgagagattaattactgtaggccggatagatgattacatcgcatccggcacgatcacaggacattagatcccatccccatactcaaatgtatggttaataccgttgaaatgctggtccatatccatacttggcttatcgctgtctggtttaccgacaatacgagccggaacgccagcggcggtggtatgcggcggcaccggttgcagcaccacggaacctgcgccaatcttcgcgccgcgcccaacttcaatattgccgaggattttcgcgcccgcgccaatcatcacaccttcacgaattttcgggtgacggtcaccaccagatttacccgtaccgccaagcgtcacagattgcagaatgcttacgtcgttttcaatcaccgccgtttcaccaacgacgatgcctgtcgcgtggtcaagcatgataccgcgaccaatttttgctgccgggtgaatatcgacctggaacgtcacagaaacctggttttgcagaaagattgccagtgcgcgacgcccctgattccacaaccagtgaccgatgcgataggcctgcaaggcatgaaaacccttcaggtataacaacggggtactgtatttatcgactgccgggtcgcgggtacgcaccgcctgaatatcacaggccgcagaggcgatcatttccgggtcagcggcgtaggcttcttccaccacttcacggatagcaatagcaggcataattgggctactcagcttgttcgccagcatgtagctcagtgcactgccaaggttttcgtgcttgagtagcgtcgcgtggtaaaaactggccagcattggctcacagtccgccagcgttctggcttcggctttaatattgttccagacaatttccagttcttcacagctcattgcttactccacacgatgagataatgaccggcccgttctgcgcgggccgggtcatagcggtaacaaaggttccctggggttagtggctgctgcgctcgtccttgcgtgcacgacctagtaaagtcaatgctgcctcgcgcgcgttttttccgcaatataatacttgataaatttcctcggttattggcatttcaacgccgaagcgatgcgccagttcgcggacttctttcgtattgcggtagccttccaccacctgaccaatcttctcctgcgcgctttgtacatccatgccctgaccgagcatcatgccaaaacggcggttacggctctggttgtcggtacaggtaagcaccagatcgccaagccccgccatgcccataaaggtggcagggtcggcacccagcgccgcaccaagacggctcatttcagccagcccacgggtgatcagcgccgtacgcgcattcgcaccaaaaccgataccgtcggacatccccgcaccaatggcaataacgtttttcaccgcgccgccaagctgcacgccaatgaaatccggattgctgtaaacgcggaaacttttgccgcagtgcagcagctgctggagatcatcggcaaaggtctgatcggtgctggccaggctaatagctgtcggtaaacctgccgccagttctttcgcaaacgttgggccagagataaccgccagcggaatttgatcgcctaaggcctcacgcgccacgtcctgtaacagacgtccggtttccgcttccagccctttggtcgcccacaccagacgcgcatcaggacgcatcagtggtttaatctggcgcagcacttcaccaaagacatggctgggtacgacgacgagaatattacggctggctgccagcgcagtggcgagatcgctttcaagatggagcgtatcgggaaaaggcacatcggggagaaacgcggcgttacagcggtcgcgttcaagcgttgcgatatgttcagggtcatggccccagaggacaacctcgtggccatttcttgccagggtgatggcaagagcggtgccgtagctgccggcaccgatcacagtcatactagcattacgttggttcatcaggcatcctgatgttcttcagtaccttcgccagcctgctgctgcaaatagttcatgaacagcgcatcgaagttaaccggcgcaaggttcagttgcgggaatgtaccgcgggataccatgctggtgatgcactcacgagcatacgggaacagaatgttcgggcagtatgctcccaggcaatgcgccatctgggtgccttcgatacccgcgatggagaaaataccgccctgctgaacttcacacaggaacgcggtttcttcgcccaaagaggccgttacggtaacacgcagtaccacttcgtatacgtcatctgccagttgggaagatgccgtatccagatcaagtttaacttctggttgccaatctttctggaaaacgtgcggcgcgttcggcgcttcgaaagagatatccttggtataaatacgttggatctggaaagtcatttcagtgttgttttgttcactcatgtgtagaaaacccttaagtgttgtccttaaatactgcgcaatgtaatgccaacgttcacacgttatttcagcaggggatccagtccaccacgtgcatccaatgcatacaagtcatcacagccgccaatgtgctgtgcgtcaataaaaatctggggaaccgtggtgcgaccgctgcgtttgatcatctcttcacgcttggcggcgttgccatcgatcggcagctcctggaaactcacgcccttgctgctcagcagtgcttttgcacgatggcaatacgggcaggtttctttggtatagatttcaacattggccataaattagctcctgtttttttaccctgaaatttcatgttgcagggcggcagcaaaatggagtgtccccagaagcttataacaataagtcgctgggggcctaattgcagctaacggcctgcatcatgaaagacgacaggtaaattatttgccgcgcaccaaaggcaagttttcgccagcccagccagcgacgccttctttcagcacgaatacttgcgcaaaaccagctttcgtcagtgcgtttgcaggctcctggcactgcatgccagaaccgtctaccacgataaccggtttgtctttgtgcttctcaagctcaccaacattgttggctttgatttcgctcggcaacagattaatagaacctgcgatatggcctttacggaagtcatcacgctgacgtaaatccacaaccacagcgtcttctttgttgatcagacgcgtagcttcaccacgagtaatcaccttcactttgctggtcaggctcttaaacgtagtcacaagaaccgccaccagtaacgcgatccaggcgatactcagtatgggatgacggccaacaaattgcataatttcttgcatggggggtaacaactcccgacgtagtgattaaaaaaaccaggaaaggagtatacctgcgcggtgcggcaaatacagccagcgcgttaactggaatgcaattttgcggggcgcgacgaaaaaaaagcgtaaatctggcatcggcttgccgcgagcggtcgtatattttgatcttcagaggctattttatcgattcagctgtagtaaaattacgcaaattttgactcttgagtatgaggttgtcgcaatgttggtttctaaaaaacctatggtactggtgattctggatggctatggctatcgcgaagaacagcaggataacgccatttttagtgctaaaaccccggtaatggatgcactgtgggccaatcgtccgcataccctaatcgacgcttccggtctggaagtcggtctgcctgaccgtcagatgggtaactccgaagtaggccacgttaacctgggtgccggccgcatcgtgtatcaggacctgactcgtctggacgttgaaatcaaagatcgcgctttctttgctaatccggtgctgactggcgcggtagataaagcgaaaaacgcaggcaaagcggtacacattatgggtctgctctccgcaggcggcgtacacagccacgaagatcacatcatggcgatggtagaactggcagctgaacgcggcgcagaaaaaatctacctgcacgcattccttgacggtcgcgacactccgccgcgcagtgctgaatccagcctgaaaaaattcgaagaaaaatttgccgcgctgggcaaaggccgcgtagcgtccatcattggtcgttactacgcgatggaccgcgataaccgttgggatcgcgtagaaaaagcttatgacctgctgactctggcgcagggcgagttccaggccgataccgccgttgctggtttgcaggctgcttatgctcgcgacgaaaatgatgaattcgtgaaagcgaccgttatccgtgctgaaggtcagccagacgcggcaatggaagacggcgatgcactgattttcatgaacttccgtgctgaccgcgcgcgtgaaatcactcgtgctttcgtgaacgctgatttcgatggcttcgcgcgtaagaaagtggttaacgtcgatttcgtgatgctgaccgaatacgccgctgacatcaaaactgcggttgcttacccacccgcttccctggttaacaccttcggcgagtggatggcgaaaaacgacaaaactcagttgcgtatttccgaaaccgaaaaatatgcccacgttactttcttcttcaacggtggcgtagaagagagcttcaaaggcgaagatcgcattctgatcaacagtccgaaagtggctacctacgatctgcaaccggaaatgagctccgcagagctgaccgaaaaactggttgcggccatcaagagcggcaaatacgacaccatcatctgtaactatccgaacggcgacatggtaggtcacaccggggtgatggaagcggcggttaaagcggttgaagcgctggatcactgcgtggaagaagtcgcgaaagcggttgagtccgtgggtggacaactgctgatcaccgctgaccacggtaacgctgagcagatgcgcgatccggcaacgggtcaggcacacacggcacacaccaacctgccagttccgctgatttacgttggtgataagaacgtgaaagcggttgaaggcggcaaactttctgacatcgcgccgaccatgttgagcctgatgggtatggaaatcccgcaagagatgactggtaagccgctgttcatcgtggaataatccctccccatgaggggaaaggcgattaataccatgacacgggccgtgaaaccgcgcaggtttgcaatcaggcccatcatctacgccagcgttcttagcgctggcgtattgttgtgcgccttttccgcccacgcggatgagcgtgaccaactcaaatctattcaggctgacatcgccgcaaaagagcgcgcggtacgccaaaagcaacaacaacgcgcaagcctgctcgcacaattgaaaaagcaggaagaagcgatctctgaagccacccgtaagctgcgcgaaacgcaaaacacgctcaatcaactcaataaacagattgatgagatgaacgcgagcattgccaaactggagcagcaaaaagccgcccaggagcgcagcctcgccgcacaactggatgccgcattccgtcagggcgagcataccggtattcagctgattctcagcggtgaagaaagccagcgtggacagcgtttacaggcttatttcggctatctcaaccaggcgcgacaagaaaccattgcccagttgaagcaaacgcgtgaagaagtcgccatgcagcgtgctgaactggaagagaaacagagcgagcaacaaacgctgttatatgagcagcgcgcccaacaggcgaaactgactcaggcgctgaacgagcgtaaaaagacgctggcagggctggagtcttccatccagcaaggtcagcaacagttgagcgagctgcgcgccaacgaatcccgtctgcgtaacagcattgcccgtgcggaagccgcggcgaaagcgcgtgcagaacgagaagcacgtgaggcccaggcggttcgcgaccgccagaaagaagcgacgcgcaaaggcaccacctacaaaccgaccgaaagcgaaaaaagcctgatgtcccgtaccggtggtctgggcgcgccgcgtggtcaggcattctggccggttcgcgggccgacgctgcatcgctatggcgaacagctacagggtgaattacgctggaaaggtatggttatcggtgcttctgaaggtactgaagttaaagcgattgccgacggtcgggtgattctggctgactggctgcaaggctacggtctggtggtggtggttgagcatggtaaaggcgacatgagtctttacggctataatcagagcgcactggtgagcgttggtagccaggttcgcgcgggccagccgattgcactggtgggcagcagtggcggtcagggtcggcctagtctctatttcgaaattcgccgccagggtcaggcggtcaatccacagccgtggttgggaagataagttttgtttccatttcgtcgtaacgttcttgcatttgccgctctgttggcgctctcctcccccgtacttgctggcaaacttgccatcgtcattgatgattttgggtatcgcccgcacaacgaaaaccaggtgctggcgatgccttccgctatctccgtcgctgtattacccgatagtccgcacgccagagagatggcgaccaaagcgcataacagcgggcacgaagtgttgattcatctcccgatggcaccgttgagtaaacagccgctggagaaaaatacgctacgcccggagatgagcagcgacgaaattgagcgcattattcgtagtgcggtcaataacgtgccctatgccgtggggatcaacaaccacatgggcagcaagatgacctctaacctgtttggtatgcagaaagtgatgcaggcgctggagcgttacaatctttacttcctcgacagcgtaaccatcggtaatacccaggcgatgcgcgccgcgcaaggcactggcgtgaaggtgatcaaacggaaggtattcctcgacgatagccaaaatgaagcggacatccgtgtgcaatttaatcgcgcaattgacctggcgcgtcgcaacggtagcaccattgccattgggcatcctcaccctgcaacggtacgcgtgttgcaacagatggtttataacctgccgccagacattacgctggtgaaagccagcagcttgctgaatgaaccgcaggttgatacttctacaccgccgaaaaacgctgtgcctgatgcaccgcgtaatccgttccgtggcgtgaagctgtgcaaaccgaagaaaccgatagaacctgtttatgctaatcgcttctttgaagtattaagcgaaagcatcagccagagcacgctgatcgtttacttccagcatcagtggcaaggctggggcaaacagcccgaagcggcgaagtttaacgctagcgcaaattaattagcgcaaattaaaggcgctacgcgtaatgcgatggtggctccgcgttttgtcgcgccattgccataagcggaaagaccacagtaacgcctggtaaccgaccttcacgctgcgcacattggtaatcaggcgcttatacataccggaagtaaatatctcggcaatcatccgttggcgggtaagaatatccggctctttgcgcaccgcatggcaaacacgcaatgcctcgtaagttatttgctgatgaaattccggataaatcataattttgtcggcataatttcgatttaatttctccagcaggcgggtaatcttaatatagtgacgttgataattaaggtttttattcccttgtctatgcaaccgactcacactcgtattatgcagataatatttatataaactttgctcggtatatcgcgcacgcagcgcgttaaacatgaattctgttgtccagacaatatcctgatgatgtaatccggcaataaatttaatgttatttttaacaataacatcacggcgataaacccccatccagacaacgtgagtccaacggcggctagaaagccccatccgcagccagtccgggccggttaatacgccggtactgcgaaggcgatcggtggggatggattgccaggtttctcccgtttcacgaaaacaccagtcagcgttgcactgcgccacgtcgaggtcgtcctctaacgccatggtcatcagcgtttcgtacatggtgggatagacttcatcgtcagcatcgacaaaagcgacatatttgcccgttgccacttcaatcccacgattacgcgccacgcttgcgccagcattcgcctgatgcaacaaacgaacgtgcggatagttttctgcgtaatactttgctatttcaacagaattatccgtactaccatcgttaataataatgatttccagagcagtccaggtttgcgtaattaaagattccatacaagtgcggaaatcatcgcccgcattatataacggaataataacactaagtttattggtgctgttcatcataaattaccgacgacctctgaagttatcctgacgttttacaggctttgtattaagaaactattaagcctgtgagatattatttttacaggtgagagagtcacttcagggtagagagataatgagagcagctatataagagatcagcacaattacgaactctttattacactgacaggattttacatatttaacagattatcctcagataaaagggctggaataccagcccttgttcgtgttaatcccagctcagaataactttcccggactggccgctacgcatagcgtcaaagcccttctggaaatcatcgatagagaaacgatgggtaatgatcgggctaagatcgaggccagactgaatcagcgccgccatcttgtaccaggtttcaaacatctcacgaccgtaaatacctttaatgaacaagcctttaaagatcactttggtccagtcgatagacatatcagacggcggaatacccagcatcgcaatacggccgccgtgattcatggtgtcaagcatggtacgaaacgctggcggcgcaccggacatttccagaccgacatcaaaaccttcggtcatgcctaactccgccatcacgtcattgagattttctttggcgacgttaaccgcacgggtgatacccattttacgcgccagctcaaggcggtattcgttaacatcagtgatcaccacattgcgtgcaccaacgtgtttcgccaccgccgctgccataataccaatcgggcctgcaccagaaaccagcacatcttcgcccaccagatcaaagctcagcgcggtatgcacggcgttaccgaagggatcaaaaattgcggctaagtcatcggaaatattgtcggggattttgaaggcgttgaatgccgggatcaccagatattcggcaaagcagcccgggcgattaacaccaacgcctatcgtgttgcggcacaaatgggtacgaccaccacgacagttgcggcaatgaccacaggtgatatggccttcgccagaaacgcgatcgccgatcttgaagcctttcacttcctgaccaatacctaccacttcaccgacatattcatggcccacgaccatcggcaccgggatggttttttggctccactcatcccagttatagatgtgaacgtcagtcccgcagatggctgttttacggattttaatcagcagatcgttatgcccgagttccggtacaggaacgtcggtcatccagatgccctcttccgctttcagtttggataacgctttcatctcacatcctcaggcgataacgcccagttgtttaccaatacgcgtaaatgcttctactgcacgcgtaatttgctcaggggtatgcgccgcagacatctgggtacgaatacgcgcctgacctttcggaacgaccggatagaagaaaccggtaacgtaaatgccctctttttgcagctcacgggcaaatttctgcgccactaccgcatcaccaagcatgaccggaataatggcgtgatcggctcccgccagggtaaagcccgccgcgctcatttgctcacggaactgacgcgcgttcgcccacagacggtcacgcagttcgctgcccgcttcgaccatctccagtactttgatggacgcggcaacaatggccggtgccaggctgttggagaacaggtacggacgagaacgctggcgcagccactcaaccacttctttgcgcgccgcggtataaccaccagaagccccgcccagcgctttaccaagcgtaccggtgataatatcgacccggcccatcacatcgcagtattcatgggaaccacgaccattttcaccgacaaaaccgaccgcgtgggagtcgtctaccatcaccagggcatcatatttatctgccagatcgcaaacgcccttcaggttggcaatcacgccgtccatactgaacacaccatcggtggcgatcagcacatgacgcgcaccggcttcacgcgcttctttcagacgtgcttccagctcctgcatatcgttgttggcatagcgatagcgtttagctttgcacagacgcacaccatcaataatagacgcgtggttcagtgcgtcggagataatggcgtcttccgcacccagaagcgtttcaaacaggccaccgttagcatcaaagcaggaagagtagagaatcgcatcttccatccccaggaaggccgccagtttttgttcaagctctttatggctgtcctgagtgccgcaaataaaacgcacgctagccatgccgaaaccgtgagaatccattcccgcctttgccgccgcaatcagatcaggatgattcgccagcccgagatagttgttggcacaaaagttaatgacgtggcttccatcagccacagtgatatctgcttgctgcgcagacgtaataatgcgctcttctttaaacaacccttccgcccgtgcggtttccagatcgttggttaactgctgataaaattctccacgcattgcgattctccagacagggcaaattccagcacatattacccaaacttataggtcgcgacgagataacgcgttaacacttctgcaaaattcaggataaataacgtgtaacttgatgtctctcaacacctacagatagtagaaaaactgtacagttttggctgggcataatgatgattgattttactgcattgatataaaaagaaaaaatgatgccaaagcatcatttttcctatctcagttggtatcaaaacgctacccactaatggagggaaacttattttctactaaggaaaattctcagcgcctgcatttttgcccctaaagtgttactcctgaagcagcgaaacaaatcgaaccattttcctctccccagatagtttaggttgaagagatcggggcgtttgtaatagcacatgacaaaaatgccctggtcatcgtccacaatgttattatttagtgttattttttgactttccagaactaatttatagaattctttccatttatgctgactaccaacaattgcgcccccaataatatatacatgattgccaatcatgaaatcaaaaacctgttgttgagatgtgacagtaagccctttttttatagtgaaaagatgcatcttactttcatcaaatgggaaatcccaaattttcaatcctcgagttacatttggcttatggcaatagccaaaatctatccacgcaacaagaggcgttttcactaagcccatgttgatagctttatttacaaaataggccttaaggttacataccaaaacatactctggactccagtactctgggttttttaattgtcgaggctcaagtctatttgtaaagctctcatctttttgaattttttcgatacgacttctgatatatctaaatttcttttttatatcgataacgataaccgttgttggttttccgttgcgaatcgcttcaacccttggtttcaaatcgggagaagtgaaaataatcatctcattttcaagtgcggccagacgctcaaagtaactaaaataaacatcaacactacgagctagtttttcacggaaccctttattagcagtccaatcccctctaccaatgtcaaaatatgcagtgataattgtggtggaacttttcattactaataagaccattaatataaaaaaagaattatatcataaatattaatagaatgtatactgtatattatccattcaaatgcttccgttatttatcatacatcggaatattgatactaaagcactattcacatgcaaaaccaacatccgccatgaaggactagctaaaacccaaactagtttgttgcaattagcatccttgcacctctatgtaaagggctgaagggattcggatgtgatggtatgattacagacattcgtgtctgagattgtctctgactccataattcgaaggttacagttatgatcatcgttaccggcggcgcgggctttatcggcagcaacatcgttaaagccctgaatgataaaggcatcaccgatattctggtggtggacaacctgaaagacggcaccaagtttgtgaacctggtggatctgaatatcgcagactatatggataaggaagacttcctgatccagattatggctggcgaagagttcggcgatgtcgaagcgattttccacgaaggcgcgtgctcttccaccaccgagtgggacggcaagtatatgatggataacaactatcaatactccaaggagctgctgcactactgcctggagcgtgaaatcccgttcctgtacgcttcttccgcagccacctacggcggacgcacctccgactttattgaatcccgcgagtacgaaaaaccgttgaacgtctacggttacagtaaattcctgtttgatgaatatgttcgtcaaatcctgcctgaagcgaacagccagattgttggcttccgttatttcaacgtttatggaccgcgtgaaggccataaaggcagcatggcgagcgtcgctttccatctcaacacccagcttaacaacggtgaaagtccgaagctgtttgaaggtagcgagaacttcaaacgcgacttcgtctatgtgggcgacgtggctgatgtgaatctgtggttcctggaaaatggcgtttccggcatcttcaatctcggtactggtcgtgcggaatccttccaggcggtagctgatgctacgctggcttatcacaagaaaggccagatcgaatacattccgttcccggataaactgaaaggccgctatcaggcgttcactcaggcagatctgacaaatctgcgcgcggcgggttacgacaaaccgttcaaaaccgttgctgaaggtgtaacggaatacatggcctggctgaatcgcgacgcataagagctctgcatgaaaatactggtgatcggcccgtcttgggttggcgacatgatgatgagccaaagtctctatcgcacgctccaggcgcgctatccccaggcgataatcgatgtgatggcaccggcatggtgccgtccattattaagccggatgccggaagttaacgaagctattcctatgcctctcggtcacggagcgctggaaatcggcgaacgccgcaaactgggtcatagcctgcgtgaaaagcgctacgaccgcgcctacgtcttacccaactccttcaaatctgcattagtgcctttcttcgcgggtattcctcatcgcaccggctggcgcggcgagatgcgctacggtttactcaacgatgtacgcgtgctcgataaagaagcctggccgctaatggtggaacgctatatagcgctggcctatgacaaaggcattatgcgcacagcacaagatctgccgcagccattgttatggccgcagttgcaggtgagcgaaggtgaaaaaagttatacctgtaatcaatttagccttagtagtgaacgtccgatgattggtttttgcccgggtgcggagtttggtccggcaaaacgctggccacactaccactatgcggagctggcaaagcagctgattgatgaaggttatcaggtggttctgtttggcagcgcgaaagatcatgaagcgggcaatgagattcttgccgctttgaataccgagcagcaggcatggtgtcggaacctggcgggggaaacacagcttgatcaagcggttatcctgattgcagcctgtaaagccattgtcactaacgattctggcctgatgcatgttgcggcggcgctcaatcgtccgctggttgccctgtatggtccgagtagcccggacttcacaccgccgctatcccataaagcgcgcgtgatccgtttgattaccggctatcacaaagtgcgtaaaggtgacgctgcggagggttatcaccagagcttaatcgacattactccccagcgcgtactggaagaactcaacgcgctattgttacaagaggaagcctgacggatgcgggttttgatcgttaaaacaagcagcatgggcgatgttctccatacgttgcccgcactcactgatgcccagcaggcaatcccagggattaagtttgactgggtggtggaagaagggttcgcacagattccttcctggcacgctgccgttgagcgagttattcctgtggcaatacgtcgctggcgtaaagcctggttcagcgcccccataaaagcggaacgcaaagcgtttcgtgaagcgctacaagcagagaactatgacgcagttatcgacgctcaggggctggtaaaaagcgcggcgctggtgacgcgtctggcgcatggcgtaaagcatggcatggactggcaaaccgctcgcgaacctttagccagcctgttttacaatcgtaagcatcatattgcaaaacagcagcacgccgtagaacgcacccgcgaactgtttgccaaaagtttgggctatagcaaaccgcaaacccagggcgattatgctatcgcacagcattttctgacgaacctgcctacagatgctggcgaatatgccgtatttcttcatgcgacgacccgtgatgataaacactggccggaagaacactggcgagaattgattggtttactggctgatagtggaatacggattaaacttccgtggggcgcgccgcatgaggaagaacgggcgaaacgactggcggaaggatttgcttatgttgaagtattgccgaagatgagtctggaaggcgttgcccgcgtgctggccggggctaaatttgtagtgagcgtggatacggggttaagccatttaacggcggcactggatagacccaatatcacggtttatggaccaaccgatccgggattaattggtgggtatgggaagaatcagatggtatgtagggctccaagagaaaatttaattaacctcaacagtcaagcagttttggaaaagttaagtagtttataaaggtaaaacatgctaacatcctttaaacttcatagtttgaaaccttacactctgaaaagtagtatgattttagagataataacttatatattatgtttttttagtatgataattgcattcgtcgataatactttcagcataaaaatatataatatcactgctatagtttgcttattgagtctaattttacgtggcagacaagaaaattataatataaaaaaccttattcttcccctttctatatttttaataggcttgcttgatttaatttggtattctgcgtttaaagtagataatagcccatttcgtgctacttaccatagttatttaaatactgccaaaatatttatatttggttcttttattgttttcttgacactaactagccagctaaaaagtaaaaaagagagtgtattatacactttgtattctctgagttttctaattgctggatatgcaatgtatattaatagcattcatgaaaatgaccgcatttcttttggtgtaggaacggcaacaggagcagcatatagtacaatgctaatagggatagttagtggcgttgcgattctttatactaagaaaaatcatccttttttatttttattaaatagttgcgcggtactttatgttctggcgctaacacaaaccagagcaaccctactcctgttccctataatttgtgttgctgcattaatagcttattataataaaagtcccaagaaattcacttcctctattgttctactaattgctatattagctagcattgttattatatttaataaaccaatacagaatcgctataatgaagcattaaatgacttaaacagttataccaatgctaatagtgttacttccctaggtgcaagactggcaatgtacgaaattggtttaaatatattcataaagagtccttttagttttagaagtgcagagagtcgcgctgaaagtatgaatttgttagttgcagaacacaataggctaagaggggcattggagttttctaacgtacatctacataatgagataattgaagcagggagtctgaaaggtctgatgggaattttttccacacttttcctctattttagtctattttatatagcatataaaaaacgagctttgggtttgttgatattaacgcttggcattgtggggattggactcagtgatgtgatcatatgggcacgcagcattccaattatcattatatccgctatagtcctcttactcgtcattaataatcgtaacaatacaattaattaagaataaacaagtttaagaagtgagttaaaactcacttcttatctatacaacttaatctctttacactattagttaaagtttcagtatcgatatcttttaccgtatatgttggggatactatttgtatagatttatgatgattcggggaccaaattaaatggctgggatattccggagtacgactattagggtaaaatgcaagcgttggtttatgataagccgcagcgatatgaacaagagctgtatcaacagaaatgacaaaatcactatacttggtcaacgcaacggtataaataaactcatcaaatggtagtgtttcgatttcaagtattggtattgtcaataaatcttgcggtaacccggtaaatataatccgataattttcaaagtgtgttttcacttcttgatatataacttttatttgctcaaacgtaagacggcatattttttttgcacctaatggattaataatgactattcttgtatctccaataaattcttttattttatcttcaacatctactggtaaatgcaagtcgtagttggtggaaaatttaccctcaccataaatatgcttcagtatttctattgctcgtgtactcatatgttcttttaaacattcatcgtggggatggtaaaaactatagtaacgcttataccaatgatcaaaacccagaatgtaagaatcttttaaactacttaatattaagctatgcttaaaactgggcatagtttcaaaggggtctaatacaatatcgaactgtaaatcccgcagatgcttacatagagtaagcatttcaagaaaaccggtactttctttaatacagaactcaaatatatttttattattagagagaaattccccaccctttctatttgtgagaagagttattttaacccctttactataaagttcacgataaatgctacttaatacaattagatcaccaagtttattattatcatgaataataaggcaacttttaacttgtgctggatctgtaatttgattatttattttattacgaaataaaaaagaaaggaaattaatcttgattttgtttatataaaatcttttctttttgtgaaaagttcctaagcgcatttttataccatattattttagtttcaggatgattaattagcataagaatcggtactagttctatattgcattttttttcttgtcatatctttactttcttctgcactgatgtcttgaagtttaataaatggaattacatcgtaagaaatagctgtatcatcacttaaattataaatattaatatcttttacattatcatgcataaaacgaaaaaatggcaatattttgaataaatccctacttaattcgctgggcatgggatttttattctcatcatagaaacgagaacagctacccgttaaatcaagaccagaacaaataatccgcgcatacttaagactatatgcgatttgaattgcagcaaaggcaatagtatggcaactgcaataaccaagactaatgtccttgcaaaatccaaccagacgaccttttttagacaacggtacagagatcagcagttctttgtgaatctgtctcaaaatattaaatttaatcttctttataaaaccacctttttcccgacggtaaaaggaccgtaatacgaggcagttctggaggatataaagtttatcttctttggaagcgtgttcataaacgtcaacgtttactatggtataacgacttctctggctaaatttataaaaatcatcacgacgctgatgtaaaaatcggacatctgtaagtacatatataaaaggaacgatattattacttaacagatattgcgcagaaccattgacagcaataatatcctttgttcgtaatacactcaaaggtgttttttggcttgtagggccgctaagaaaaataataacatcatcagatattttattttcaatcaggttttcaacatcttttttgtcaatgtatctaatattcttcatgataaacctgtgaaataaataactccgcttaaaactgtcctggtgaagacatgtaattgtgggattttttttagcgcgctggtttccctttcaaacgccgcataaaattgcgcatttttttacgatatactaaaagataatagcctagatctctaatctcatttttaataccgtaatgacgctctaagtcaatacgatctttcgctttacgctgcgcactagcacgctttccggagagatcgataattcgaacctcaccattttttataatgaagttaccacgatgggggtcgccagaaaccatgccatgttgatgtaaggcattaatactttgctgaattttattttttagcgcatcatcaatatcgggcatatcacacaactctatgccatcaatatactcgatgatcatgatataagtatggacaaaacgtaaggttttccgttcagccaataaataaaagtcattgagtgtatttaacccttcatttcgtactttttgggtttgctcaaaaaggcgttcgtaataatcaccttttaacagagacttaaagaaacgttcgttacgcttaactttcggagaaaaaaccttaagaatcaatttaccgtaatcggtatcaataagcataacttttgtatcatcaatagaacgaaaaaccttgatgatatttatattataagacaagaagtcatttaatacattgaggtacttactattgttttcatcggtaaaaacaaccaagtctttgatcttgctcttctgaatcataataaaccagttaaatgttatttacggtaatattttcggcaaagataacagactcctgctataattcctgagatataatgatgttgcactaaaagatgtttatatcttttttaaattcaataattgatttcgcatctcgtggagagtcatctttccagggggaattttctaaagctattttatagtattttaccgatggataaattgcccatttgtgccacggtttagttgcacctgtataatgaataagaagagtactttctgtaatcagctttttatagttttgatgtgttttgtcttttaattcacttttaattgtataaattgtattgtactcacgaggcaaaaataatgtcatccctttcagtaagacattcataacatcctgatcagggtatttataaacattatctttactcataagaatagacaacgctttttctgttagttttgcgtcagcccattttcttaagtctaaataaacgacaccggaattaaagtactgcccaagtaattcaggatcagacaacctggataccgccttttcttgcattggctcaacatctttaacaacagcagcaaccgctccatttaaacccagatgtaatagttggctaatatcgcctttacaaacaacatctgcatcaagataaagcaaacgatcaagcgttaaacccaataattgaaatgcaaataaacggaagtacattgctcttgaccagacctgtgtacaaggcaagcactggagcttatcagtgttaattctatataacgtgattcttaattggttttgctctgcaagctttgcaattttttgaaaaaaaccatcattataaacatcagcaataatataaaaatcaagattaatatgtcgattatttaggacaattgatgtgatggaaacacctacaccatcaagataattagcatcgacaccataggcaacatttaaacattcagaagtatttatattagctagccgaaaatcccaggctttaactttatctatctctatggcaggaaatgagtccacaatgctacccttatatcattactttatagtttcccagttttaatgctttatcttttcaataaaataaaaaagatagttgctaaatccttttagatatctatgctttttaagcatatgttttgcgctatatcttaattgattgctattgttcggtttcagcaacgccgtattcttccatgggctagcattttttgcctccataaaggcttgacttacaggataatcccaggcccaatcatgccagggcttggttggcccgatataatggataaaaatagtatcgttggttactgggtttataaagctttctttgagttgataatttaagctgaactgggtgttatatttaatatcagcgaaaataagtttatccgccagcaacatatttaacacatcctgatcaggatgtgttatttttttgattatttctggctcatttagcattgcaatagctcgtgcagaaacctgctgagccgcccattgggcagtattaatcaataaaaaaccggagttaaagtaacctttagcaattcccgcaacacctaagctatgggcgcgtttttcccaccagtcagcttgcccttctgtaacaaccattgcgactttatcgtcaggaaaactgaaattaattagtggctcaatagtcccctgacaaatgatatctgcatccagataaaggactttaggcgccttattaataaagtaatctgcaataacaaaacgaaaatatattgcatgagtccaattcttagtgctaggcaaactgcgcagtcgatcaccattaatcagatatattttaattctggttttatactgcaacgccagggcatcaaaatacttacgatcatcatcaccaaaataatcagtaaaaatatggaaacacaatcgacttccttcattatattttaatatactagcaatgctaattccgcaaccaaatagaaagtttttgtcagttccataagcgatgtccagacaaagattttctgtttctactttatgatcataatcaataacactattaagaaactcagtttcctggaaaaacacctgctgcattatttcctccgggaaatagcagaaataattaccttatgtaatctatcgtaatacttgctttggtaaaattcatcgatgctcgcaggaattttttcatgttcgatatgaatttcacctgctatatatttatttagaagagttacaaaaccagcaatatctcccggttgatacagatggccattgacatcaggttgaataatgtcagcaggcccggagacacaatcggcactgatacaaggaatcccccagctcaaggcttcaagtagggtcattgggaaaccttcaaaagaactcgtgagcaataacgcactcactttttcaatatcttgctggaccaattcccagggatattgttgccaaccataccagacaattcgatcatcaatatttaattctctaccataagcctggcatttttcgaaatcggagccatcacccaatacatggagtttccagttacctttcgcttgacttaagccatcaagcaggtctttaactcttttctggccttcaaatttcatacgcccaacataaataaacgttgccgtttcaccttcctcgggcgcgggaatgacactgtctttagtttcgacgggattaaaaataacatttatcgtgctttctgctacacctcgattaatcatttgctgtttaatgccagagctgattgctaaatgatagtcggcacaggtgatatattcagcatgttttttgtgatctaaagaaaaatgtggccaactaaatactggcatatcaattccactttttttacgtgcttttgcggcaaacaggcaggagatcacatcaatacaaataacgatatctggttggtactcctgaagccatttacttagagcatgaatatgtttcgcccgacgcaaaaaacctaaacgaatattggaaaaactacaactgtatttaataccttccagccatcccttatccattttgtcattacgacaaaagaaaaacatttcactttggatatgttgttgcctgaaggtagtaataacatcacggatgacagtttccatgccgccaaatccagaaacagcttcgccgataaacgctattttcatagaaactctcattaattgagtaaaactcactgttttaacggttttatttgtctataaaatcagaaacaatcgtactcatcattttatctggactgaatttatataaactatcataatccattggtttaacagaactgttaataaaatactctaacttatcccaatcatcatgacctattataaaaaagcgagattcactatagatttcactaccaaatacatttatattattagtaattaattttttattgaaaaatagtgcctcaagtatacgaagagtccagccagattggttttctttggttatatcaacaattatattagcatttaatgttcttctaatattctcttcataagatatttgtttttcaatcaaatacttactagtcgtagaacttgtcttatctttgacaacattaaaatctagcttacatcctagtgttgttaatctctcggctaactcattaattatttgaagacgccctttatcacgaccaaggaaaaaacatattggctggctgttatttttgtcagataaactataatttctaatttcatccattcctataggaaaaaattgttctattgccttgatcttttcattccctataaatctatgctcaaaatcatatataatatcgaaataattcgcgttatcaagaataaaatcttcgccaacagtatttcttagaagcaaaactttatgacagttaatattttttaatatttgtttattgatacctttattaacaacactgtcattaatgataattatgtcatcttttttaatatcattgaggtaatgcttgatgaataatcgccccagccatgcattatccatccctattttacttatttttttattaatccagttatatttttttggtgttgttatattttttatcttgtacttttttttcaggtactgaatcatttttaattcataatctgcaacccaatttataaaataaatagtcataataaagttagttccagtacatactaataaatatttttataatcctttgcgttgtgttcgctctttaatacgctcggccttaacgcttgccatgttcaataaattctgttcaagagacaatattttgcgtaaaggcatcccaaaataaaccttcataaatcgccagatatctctttgcgtcaggccaatattcatactactgaaatataaaccaatcaggtctttatcgcgccagcggcgcggtacttttgcacgtatctgtgcccgatgcagatcgataacactaatttttaattcatcttcccggccagtaaatggcaaatgaagcaaaaagtggcaaatgtaacagtcgcggtgatttatccctgcagtatgcattttacgcaccatagttgctacacgtgcgatcagcatacgcttaacacgtatatcaggcgggttgactgcccaatcggcacaataatcttcaaggctaattgtgggagtgagatcttcggtaataataaaacttgcgcgagttaatggatttaaccctttttcgccaaacccaatgcccttcattgtatcaacgccaacatcactcaggcgatgaatagcgtgccactctctgtctgcgcccaaaacgggcatccgcaaactgagtagattttttataatctcttttaatgtcgtccccttgtgccatttaagaaaatagcttttcccggacagttcaaagcgtaatgtacgacgagtctccagttcacgaaagacctcgccgttcagttttttgacctctgcaaaagcatctttaccacgccaaagtgtggcaagcggctcttttaattcaaccatctaaaccacctgtaatgatatccgcggctttttctggcaagctatacaaatcctgagtatcggcataatggcgagcattctccgcccaggccattcgcaatgggctctgagttaacgctttacgtaaaacttcatttaattgttcctgagagaaaggttcagcgatgaccgttccacaattggcatccgcaatataatgcgcgtacccacataccgctgttgttaaaacaggtaacccagcagtgatcgcttctagaagaacgatacccgcggcttcctgataagcgggatgcagtaataaatcagcggctgccattaattcactcacatcattgcgaccggagaagaaatgcacattgctccgcacgccgagtttttctgccagcgcttcaaattttcgcggcttatcctgaccaacaacaaataaaagcgtattgtgacgtaaactttccggtaagcttgccaaagcttcaatactgcgatctacacctttacggccaaaatcacttccaacctgcagtaataagttttgttgctcttttatgccatttttctggcgataaatttcacggctgtttgggatttgctcactgtattttctgtccggataaataccgggaggaagaatttgaaaacgttcaggttcagtttgataatgcttctggaaatcggcgatttgcttatcggtcagcatcataagtttcgtgcttttaccctgctcgaaagtcgctcgctcaaatgcggcataatggcgatatcgacttgttaaacgatataaaaaacctttttcttgcgcaactttctcggcgtaacaaacatcagcggcaaaataaacatccaggccaggcatcttattaaacccaacaacgcgatctgcgggatgctctttgagatgattttgtacccaggcataatattctgcattgcgtccatggttggtatgggacttaactggcacctgaataagctcaaatgctttcgggcaatcgccttcccagctctgtgtatatacccgaacatggtggccccgtgcggcaactgtacttgcaatgcgcataaagtcacgttgaagcccaccaaatggaaaatatttatataaacaaaacgccacgatcataattgtgcattcctgtcagcactaggggcatcttctggcaacagcttttccgtagcggcgatcacatcctccgctgggataacagaaagatattttttgttgcggtcaagttcatgccgggtcggcattttctgataattccccgcccagaattgaataatattctcggtccagggacgccagaatacgtgatccgttgcaccaaatagactaatgactggcgttttcactgccgctgcaatatgtcccggcgcagaatccacaccaataaaaagcactgcatgatcaattaatgcacccagttcaggaaaacgtgttttacctgcaaggccagtaatgggttttgtttcgcaacctcgtgcaatctcatctacacaagcgagatcatctgcgctgggcccacaggttagcacaacctgatagcctcgctgttgcagcgcatcgataaccttagaaaatttatcgttatcccaacacttaaatatctgacgcgctgtcggttggatgacaacataatgatcttttacgcccagggcatctaattcccggcgcatcttcttccagcaatcttcggcgtaactcattgttgtgtcggtgtagaaatcggtaatacctaatggctcaaggacgcttaaattacgctcaacaatatgtgtaccgtgtattggcgctaagtgtgtgaagctttttttccaaataccatgctgccgatgaccataaagttggcttattttcatccgtgcaggtaaacaacgtaccagcagcgccaccatccactgatccgtaagattaatgaccaggtcataattattcgcacgcagagtttttatcaagctaagcacatttttaattttatcgaaagttcccgcacctttattgcttatcccatagagcgcattaatttccgggttttcagacaaaatagggatggtgtcctgataaagcagcatatcgatttttgcatcaggataattctgcttgagcgtactgatgacaggagtagttaataacatatccccatgatatcgcatctttatgaccaggatttttcgaaatggcttttccactagcgactcttttgtgtgattgtctggttaagttaagcagaaaaaagcacgctaccgccccaggctcaacagctacctgaatactgataacgcacttactttgacgtgctagtgtatcatttctttcgcagcaatccgacccgaatgatttttatacacaaaatatactttaatcataaaaatcaaatagataaaaaatagcatttcgataatgtcagtacggcctatgtagatttgaaaatggggccgagtttcaatgaatcgcataaaaatacaaaaaaaatgaagatgtagcggcagatcagaccaaactgaagctatttaagtcaaaaacgggaaaagtaatggtaaagccacagctaaatacatagaatccccagcacatccataagtcagctatttactatgctcgaattgctttacaccgcccttctctaccttattcagccgctgatctggatacggctctgggtgcgcggacgtaaggctccggcctatcgaaaacgctggggtgaacgttacggtttttaccgccatccgctaaaaccaggcggcattatgctgcactccgtctccgtcggtgaaactctggcggcaatcccgttggtgcgcgcgctgcgtcatcgttatcctgatttaccgattaccgtaacaaccatgacgccaaccggtagcgagcgcgtacaaagcgctttcgggaaggatgttcagcacgtttatctgccgtatgatctgcccgatgcactcaaccgtttcctgaataaagtcgaccctaaactggtgttgattatggaaaccgaactatggcctaacctgattgcggcgctacataaacgtaaaattccgctggtgatcgctaacgcgcgactctctgcccgcagcgccgcaggttatgccaaactgggtaaattcgtccgtcgcttgctgcgtcgtattacgctgattgctgcgcaaaatgaagaagatggtgcacgttttgtggcgctgggcgcaaaaaataatcaggtgaccgttaccggtagcctgaaattcgatatttctgtaacgccgcagttggctgctaaagccgtgacgctgcgccgccagtgggcaccacaccgcccggtatggattgccaccagcactcacgaaggcgaagagagtgtggtgatcgccgcacatcaggcattgttacagcaattcccgaatttattgctcatcctggtaccccgtcatccggaacgcttcccggatgcgattaaccttgtccgccaggctggactaagctatatcacacgctctagtggggaagtcccctccaccagcacgcaggttgtggttggcgatacgatgggcgagttgatgttactgtatggcattgccgatctcgcctttgttggcggtagtctggttgaacgtggtgggcataatccgctggaagctgccgcacacgctattccggtattgatggggccgcatacttttaactttaaagacatttgcgcgcggctggagcaggcaagcgggctgattaccgttaccgatgccactacgcttgcaaaagaggtttcctctttactcaccgacgccgattaccgtagtttctatggccgtcatgccgttgaagtactgtatcaaaaccagggcgcgctacagcgtctgcttcaactgctggaaccttacctgccaccgaaaacgcattgaggttgttatgcaaaaacgggcgatttatccgggtactttcgatcccattaccaatggtcatatcgatatcgtgacgcgcgccacgcagatgttcgatcacgttattctggcgattgccgccagccccagtaaaaaaccgatgtttaccctggaagagcgtgtggcactggcacagcaggcaaccgcgcatctggggaacgtggaagtggtcgggtttagtgatttaatggcgaacttcgcccgtaatcaacacgctacggtgctgattcgtggcctgcgtgcggtggcagattttgaatatgaaatgcagctggcgcatatgaatcgccacttaatgccggaactggaaagtgtgtttctgatgccgagcaaagagtggagctttatctctagtagcttggtgaaagaggtggcgcgccatcagggcgatgtcacccatttcctgccggagaatgtccatcaggcgctgatggcgaagttagcgtaacgtttatgccggatggtatgccatccggcgcgcatgaattacttctggcactgccgacaataaaacgttgcccgctgcgcatgtttagtcgccacaatcggcgtaccgcacacccgacacggctcaccttttcgcccgtaaacctgcaattcctgagcgaaatagcccggtttaccatcactttgcagaaaatctttcagcgttgtaccaccctgctcaatgctacgcagcaacaccgctttaatcacccgagctaacaattcacactctgccaggctcagactactcgccagccgatccggatggatccccgccgcaaacagactttcgctggcatagatattccctacccctaccaccagcttgttatccatcagccacggtttaatcgccgtttttttcttcgcgcacttctgatgcagatactcaccattgaaatcgtcgctaagcggctccggtccaagatgggtcagcacattatgcccttccagctctttggtccacagccaggcaccaaagcggcgcggatcggtgtagcgcagcactttgccgttgctcatcaccaaatccacatggtcatgcttttcagggggaagttcttctggaaggatgcgcaggctgccagacatccctaaatgaatgataatccagccctcaggcagctccagcagcagatatttagcccgccgctgcacgctaagcactggttggtcgcttaaacggtagatctcttcactaaccggccagcgcaagcgtccgttgcgcaccactgcatgaagaatggttgcaccaacgagatgcggttctatgccgcggcggctggtttcaacttcgggtaattcaggcatagcatctccaggaatgaacagatgcagtcaatatgggggcaagcagataacaaaaaaccccgccggagcgaggttttttgttacatcaaagcgagaattatttgattttcgcttctttgtagatcacgtgctggcgaacaactggatcgaattttttcagttccagtttttccggcttagtacgtttgttcttcgtagtggtatagaagtgaccagtaccagcagaagaaaccagcttgattttctcacgaatacctttagccatgatttatttcctctaagtacttagtacttttcgccacgggcacgcagttcagccagaactgtatcgatgccttttttatcgattacacgcatacctttagcagatacgcgcagggtgacaaaacgcttctcgctctcaacccagaaacggtgagagtgcaggttcggcaggaaacggcgtttagtcgcgttcagtgcgtgggaacggttgttaccggtcaccggacgcttgccagtaacttggcagactcgggacatgtctattctccaaaaatcaaattagctcgagcttcgtatggggtattggcgcctcgtcaggctttacagcccggtcatcgcagttctatgtgaactctcgattgccaggcccaaatgccaaacccgagattctcaaaggtggcgtagtatacgctgactcagcgatgtgctcaagtcccgaacagacaaagatcccgaaggatcgcgcatagcgggttaaatccagccgcgttcggcaaaagaaacatactctccacgcccaatcacgatatggtcgagcacgcgtaaatccatgaactgacaactctttattatccgttcagtaatgagtttatccgctttactgggttcagcacaaccgctagggtgattatgtgcaaggatcagcgcgctggcgtttatttttatcgcttcgcggataatttcccgaggatggacttcaacatggtttagcgtgccggaaaaaagacgcctatgcgttataacccggtgttgggagtcgagaaagatcaccataaagatctcccgctcctcacccgtgagctggctttgtaaaaattccctcgtcatctccgggctgagtaaagggctttcttcacgcatccgcacgttgtagtaacgccgcgccagttcagcaatcccctttaactgggcaaatttcgccacgccaattccatgaacgccactaaattgttcatattcagaggttaacaagccataaagagagccgaaattctccagcatctcttttgccagggttaatacatctttaccgcgcgttccggtacgcagaaatagcgccagcagctcgacatccgttaaggcgctaataccaaacttcagcattttttcgcgcggcatcaacagctgactattgtttttcaccttcacctcctttgtggtgctcgcatcctgtcatagccgtttcgttaaatcgacggccagttttcaatcctggaaagcgcctcgcaaagtgaatctcaggtgaaggcacgacaacaaaagtattgtgataaaatcgccaacttctggtgtcaccctacaggaaaaatcatcatgagcctggccggtaaaaaaatcgttctcggcgttagcggcggtattgctgcctataaaacccctgaactggtgcgtcgtttgcgcgatcgcggggccgacgtccgcgtagccatgaccgaagcggcaaaagcctttatcaccccacttagcttgcaggcggtttctggttatcccgtttccgacagtctgctggacccggcagccgaagccgctatgggccatattgagctgggtaaatgggctgatttagtgattctcgcccctgccacggcagatttgattgcccgtgttgctgccggaatggcgaatgacctggtaagcacgatttgtctggctacacctgcgcctgtagccgtgctccccgccatgaaccagcagatgtaccgtgccgctgccacgcagcataatttagaggtgcttgcttcccgtggtttgctcatctgggggccagacagtggcagtcaggcttgtggtgatatcggtcctgggcgaatgctcgatccgttaaccattgtggatatggcggtagcgcattttagccccgtcaacgacctgaaacatctgaacattatgattaccgccggcccgacgcgtgaaccgctcgatccggtgcgttatatctctaatcacagctccggcaagatgggttttgctatcgccgccgccgctgcccgtcgtggcgcgaacgtcacgctggtaagtggtccggttagtctaccgacgccaccgtttgttaaacgtgttgatgtgatgaccgcgctggaaatggaagccgccgtgaatgcttctgtacagcagcaaaatatttttatcggctgcgccgccgtggcggattatcgcgcagctaccgtggccccagagaaaatcaaaaagcaggccacgcagggtgatgaattaacaataaaaatggttaaaaaccccgatatcgtcgcaggcgttgccgcactaaaagaccatcgaccctacgtcgttggatttgccgccgaaacaaataatgtggaagaatacgcccggcaaaaacgtatccgtaaaaaccttgatctgatctgcgcgaacgatgtttcccagccaactcaaggatttaacagcgacaacaacgcattacaccttttctggcaggacggagataaagtcttaccgcttgagcgcaaagagctccttggccaattattactcgacgagatcgtgacccgttatgatgaaaaaaatcgacgttaagattctggacccgcgcgttgggaaggaatttccgctcccgacttatgccacctctggctctgccggacttgacctgcgtgcctgtctcaacgacgccgtagaactggctccgggtgacactacgctggttccgaccgggctggcgattcatattgccgatcctagtctggcggcaatgatgctgccgcgctccggattgggacataagcacggtatcgtgcttggtaacctggtaggattgatcgattctgactatcagggccagttgatgatttccgtgtggaaccgtggtcaggacagcttcaccattcaacctggcgaacgcatcgcccagatgatttttgttccggtagtacaggctgaatttaatctggtggaagatttcgacgccaccgaccgcggtgaaggcggctttggtcactctggtcgtcagtaacacatacgcatccgaataacgtcataacatagccgcaaacatttcgtttgcggtcatagcgtgggtgccgcctggcaagtgcttattttcaggggtattttgtaacatggcagaaaaacaaactgcgaaaaggaaccgtcgcgaggaaatacttcagtctctggcgctgatgctggaatccagcgatggaagccaacgtatcacgacggcaaaactggccgcctctgtcggcgtttccgaagcggcactgtatcgccacttccccagtaagacccgcatgttcgatagcctgattgagtttatcgaagatagcctgattactcgcatcaacctgattctgaaagatgagaaagacaccacagcgcgcctgcgtctgattgtgttgctgcttctcggttttggtgagcgtaatcctggcctgacccgcatcctcactggtcatgcgctaatgtttgaacaggatcgcctgcaagggcgcatcaaccagctgttcgagcgtattgaagcgcagctgcgccaggtattgcgtgaaaagagaatgcgtgagggtgaaggttacaccaccgatgaaaccctgctggcaagccagatcctggccttctgtgaaggtatgctgagtcgttttgtccgcagcgaatttaaataccgcccgacggatgattttgacgcccgctggccgctaattgcggcacagttgcagtaatatgacgccggatgacttttcatccggcgagtttctttaaacgccaaactcttcgcgataggccttaaccgccgccagatgttccgccatttccggcttctcttccaggtaagcaatcaggtctttcagggtgatgatagagatcactttgcagttgtaatcacgctcaacttcctgaatcgcgctaatctcgccgcgcccgcgttcctgacgatcgaggctaatcaacacgccagcaagcgtcgcgccattggcctgaataatctccatgctctcgcgaatcgccgttccggcggtgatcacatcatctaccagcattacgcgtccttgtaacgcgctaccaaccagattgccgccttcaccgtggtcttttgcttctttgcggttaaagcagtacggcaggtccaggtcgtgatgctccgccagtgccacagcggttgtggtggcaatcgggatccctttgtaagcagggccaaacagcagatcgaactcaatgccggaatccaccaacgcttcagcgtaaaaacggcctaacagtgccagatcgcgcccggtattaaacagcccggcgttgaagaaataggggcttttgcgcccggatttcagcgtaaactcgccaaactttaacacctgcttgctaagcgcaaattcaataaactggcgctgatatggtttcatgccttcgctcctcatcttacttttctacagacaaaaaaaaggcgactcatcagtcgccttaaaaatcagtttgccagcgccgccttctgcgtcgttacaatggattgctttcccctcgggccagagccaacaagatgagtagctcttcatgggtgaacggctcgccttctgccgtcccctgcacttcaatgatgcgcccgtcttcggtcatcactacgttcatgtcggtctctgcggcagagtcttcaacgtattccagatcgcaaaccgcttcgccgttcacaattccgacagaaactgcggctaccatccctttcatcggattggttttcagcttgccgttttccaccagcttctgtagcgcatctaccagcgccacgcaggcacccgtaatgctcgcggtacgcgtgccaccatcagcctgaagcacgtcgcagtccagcgtaatggtgaactcacccagcgctttcaaatctactgccgcgcgaagagcacgggcgatcagacgctggatttccattgtgcgtccaccctgcttacctttcgccgcttcacgagcgttacgggtgtgggtagaacgtggcagcatgccgtactctgcggtgatccagccctggccctgacctttcaggaagcgcggcacgccttcttcaatagaggcggtacacaacactttggtatcgccaaattcgaccagcacgctgccttctgcatgttttgtatagttacgagtcagggtaacgggacgcacctgattattgctacggcctgctggacgcatattgaaatctccggcttgaaacaaatgtggctgcgcattatacggacttccggcggttattcctatcctgacaaggcatcgatggctataatccttccacctctccttttataaacaggaacgtctatgatccgcagtatgaccgcctacgcccggcgtgaaatcaagggtgaatgggggagcgcaacctgggaaatgcgcagcgtaaaccagcgttatctggaaacttactttcgtctgccggagcagttccgtagccttgaacctgtcgttcgcgagcgtattcgttctcgcctgacgcgcggtaaagtggaatgtaccctgcgctatgagccagatgttagcgcgcaaggtgagctgatcctcaacgaaaaactggctaaacagctggtaactgccgcgaactgggtaaaaatgcagagtgacgaaggggaaatcaacccggttgatattctacgctggccgggcgtgatggcagcccaggagcaggatcttgacgccattgccgctgaaattctcgcggcgctggatggtacgctggacgactttattgtcgcgcgcgaaaccgaaggtcaggcactgaaagcattgatcgagcagcgtctggaaggcgtcaccgccgaagtggtcaaagtccgctcccatatgccggaaatcctgcaatggcagcgtgagcgtctggtcgcgaagctggaagatgctcaggtgcaactggaaaacaaccgtctggagcaggaactggttctgctggcacaacgaattgacgttgccgaagaactggatcgcctcgaagcgcatgtcaaagagacctacaacattctgaagaaaaaagaagcggttggtcgtcgtctggattttatgatgcaggagttcaaccgcgagagcaacactcttgcgagcaagtctatcaatgccgaagtgacaaactccgccatcgagctgaaagtgttgattgagcagatgcgcgagcagattcagaacatcgaataactcgtaacgccaattcttacttttccgccttcacaaatgccgccactcaaacagagcggcatttttcttccccgcaacattcaattctgttttgcgtgcctgctccagattttgcgatgtttttttgcccagcacactgagaacgtgagatactcacaactgtatataaatacagttacagatttactttctttgcaattgatatcacatggagtgggcaatgaacgaacatcatcaaccttttgaagagataaaactgattaatgcaaacggagcagaacaatggagtgcaagacaacttgggaaactactgggttatagtgagtatcgtcactttatacctgtattaacgcgcgccaaagaagcctgtgagaacagtggtcacacaattgatgaccatttcgaggagatcctcgatatggtcaaaattggcagtaatgccaaaagagcattaaaagacatcgtactctcccgctatgcctgttacctggtagtacaaaacggcgaccctgcgaaaccggtcattgcggcagggcagacttattttgctatccagacccgacggcaggagcttgctgacgatgaagcatttaagcaacttcgtgaagacgaaaagcgtctgtttctgagaaatgagttgaaagaacataacaaacaattggttgaggcagcacagcaagctggggtagcgacagctactgatttcgccatatttcagaatcatggttaccaggggctgtatggtggattagatcagaaagctattcatcagcggaaggggctgaaaaagaatcagaagatcctggatcatatgggtagtacagaactggcggctaatctctttcgagctacccaaacagaagaaaaactcaagcgggatggcgtgaatagtaaacagcaagcaaacaccacacactttgacgtgggtcgcaaggtgaggcaaaccattcaggaacttggcggaaccatgcctgaggagttgccgaccccgcaggtcagcatcaagcagttggaaaacagtgtaaaaattacagagaagaaataacagaaactaaaaactctttttgttgattgagacacccgatgcgtaagccaaggtccaggtgcagtgaacacaatggctaaatattgcacctttcttttccccctcagttttaacctattttttcttatgcattttctcagacaagaagtcagaagaatgcatctctgctacagaaaatagcgatttcacataactacaagttatcaatttcccctccccttaaaaaatctcaatcgtgacaatgcgcacaaatcgctaccctgccagacagatttttagggagagaaccatgctgttacacattttgtatttggttggcattactgccgaagccatgacgggggcgctggcggccggacgacggcgcatggatacatttggcgtaattattattgcgaccgccaccgcaattggcggagggagtgtgcgcgatattctgctgggccactatccgctcggctgggtcaaacacccggaatatgtgattatcgtcgctaccgccgcagtactcaccactatcgttgctcctgtaatgccttacctgcgcaaagtgtttctggtgctcgatgcgctcggactggtggtcttttctatcatcggggcacaggttgcactggatatggggcacggcccaattattgccgttgtcgcggcggtaaccaccggcgtgtttggcggcgttttgcgcgatatgttctgtaaacgtatcccactggtattccagaaagagttgtatgccggtgtcagttttgcctccgccgtgctgtacatcgcgctgcaacactatgtttctaaccatgatgtggtaattatctccaccctggtattcggcttttttgcccgcttactggcgctacgccttaagctgggattaccggtcttttactacagccacgaaggacattaaggttcaaaacctgtgatctgctgggcagccagccaactgcccagcttcttgatttgcgcattttccttccattcaataacctgtctggcgcgtccgcttccagtccccggcagctgctgccagaactgctccgtgctaaataaaagttggctccaggaccgttcatcactggcattaagcgccgcccgggttagcggtattcccattgccatcacccagcgagtaaaaggctgcttacgagccagattaaactgatgccatagctgcgcacttttacttttcgcgatccccggcgtgttctgtaattgctctggcgttaataaaagccaggaaaagatatgttcaaagcgatgagtctgatgcagcgcgcgccaaccggcctcaccaatgccatccagcccaagaacctgttttgcccccagccagactaagcgactaatgaactgttcctgacaaacatcagaagcaaagtagcaggtcaagctgttaaagcggttttctggcggtgtcggttttgtacgttctgcaccgcgccacaccacatcatcaatgcgaggaataccctgaccggcaaggctgacgagaatctgatcaccaggcgcaatatcccactcctgccagcgcctgacggaaccaatattcacccgctggacttttttatcatccagcatgacaggtgcgagactcgcaaccacgcttattttaccgctcttacccaccgcaaactgaattgccttcacttcggcaacctgagctacaggttgatatttccaggccaccagccactctgcctggcccggtagccaatggcgggattctggctctttcgccgctcgtacaactacgccatcggtgacgaagggtaattccgctttccaccactcattgcgtacgcgcgcaacttcatcagcatttttcaccgcacgggtatacgtctgcgttagagtaaaacctgcggtagccagctcttttaaacgatcagacattaactgcggtccatccggccatgcccagacaaaaacgcccagagaattcagcgtgtcgctatcgtcctggcgcatcatcaagccagcaacttttgcgcgggcatttattccccccatttgttgttggatatgcccctcgcgctggagaaatatttccccctgaagcgtactgttggctaaaggcccgctaacggtttgcggcacagcggaaattaagctaactttctgcgtccagtcctcgcctttcaggccattaccgcgactgattgctttgttcagtttcccgtcccgataaaccagggttaccgcaacgccatcaacttttggctgcacccaaagatcgctacgttctcgcatccacagacttaatgcgtttttatccaccattttgcgtacacccgtatgggcaaccggatgcataaccgcaccatttaaaggcggcatcatcacgtcgcggggctcgctcccaaagcagcgttgccactgcgtaagacgggcgcttaactgatcgtaaacaccgtcttccacctcactttttccttccttccagtagtcatcgtcccactgttttatttgctgttgcaggcgggaaatttcttcctgtgctctggctgggctccaggccggacagaccgcccacacagaactttgccagcacaagatacctattaatatcgccatccatactttcatcatcacctccgctgtagatagtcaggcagatatacaacgtgatgaaagcaaagccgagtggcaaaaacggagtctgcgaggacgcttcctgaaaatcgtctttattgcagtgaatgacaggcaaatgcggaagcagctacgcaaaacgcaacaactttgcgcaaaaagtgtgagcaagggctacgtcacatggccgcgccgtgtataataagctcgtatgtaggctttatttcgctaatcacatacgaaagatactcatggctcaaggcacgctttatattgtttccgcccccagtggcgcgggtaaatccagcctgattcaggctttattaaaaacccaaccgttgtgtgacacccaggtttctgttagtcacaccacacgccaaccgcgtcctggtgaagtccacggtgaacattatttctttgttaatcatgatgaatttaaagaaatgattagcagagatgcgttcctcgaacacgcagaagtttttggtaattactatggcactagccgtgaggccattgagcaagtactggcgaccggtgtcgatgtttttctcgatatcgactggcagggcgcgcagcaaattcgccagaagatgccgcacgcgcggagtatctttattttaccgccgtccaaaattgaactggaccgccgtctacgcggtcgcggtcaggacagcgaagaggtcattgcaaagcgtatggcgcaagctgttgcagaaatgagccattacgccgaatatgattatctgattgtgaatgatgacttcgataccgcgttgaccgatttgaagaccattattcgcgccgaacgtctgcgcatgagccgccaaaagcagcgtcatgacgctttaatcagcaaattgttggcagactgaacctgatttcagtatcatgcccagtcatttcttcacctgtggagctttttaagtatggcacgcgtaactgttcaggacgctgtagagaaaattggtaaccgttttgacctggtactggtcgccgcgcgtcgcgctcgtcagatgcaggtaggcggaaaggatccgctggtaccggaagaaaacgataaaaccactgtaatcgcgctgcgcgaaatcgaagaaggtctgatcaacaaccagatcctcgacgttcgcgaacgccaggaacagcaagagcaggaagccgctgaattacaagccgttaccgctattgctgaaggtcgtcgttaatcacaaagcgggtcgcccttgtatctgtttgaaagcctgaatcaactgattcaaacctacctgccggaagaccaaatcaagcgtctgcggcaggcgtatctcgttgcacgtgatgctcacgaggggcaaacacgtagtagcggtgaaccctatatcacgcacccggtagcggttgcctgcattctggccgagatgaaactcgactatgaaacgctgatggcggcgctgctgcatgacgtgattgaagatactcccgccacctaccaggatatggaacagctttttggtaaaagcgtcgccgagctggtagagggggtgagcaaacttgataaactcaagttccgcgataagaaagaggcgcaggccgaaaactttcgcaagatgattatggcgatggtgcaggatatccgcgtcatcctcatcaaacttgccgaccgtacccacaacatgcgcacgctgggcagtcttcgcccggacaaacgtcgccgcatcgcccgtgaaactctcgaaatttatagcccgctggcgcaccgtttaggtatccaccacattaaaaccgaactcgaagagctgggttttgaggcgctgtatcccaaccgttatcgcgtaatcaaagaagtggtgaaagccgcgcgcggcaaccgtaaagagatgatccagaagattctttctgaaatcgaagggcgtttgcaggaagcgggaataccgtgccgcgtcagtggtcgcgagaagcatctttatagcatttactgcaaaatggtgctcaaagagcagcgttttcacagcatcatggacatctacgctttccgcgtgatcgtcaatgattctgacacctgttatcgcgtgctgggccagatgcacagcctgtacaagccgcgtccgggccgcgtgaaagactatatcgccattccaaaagcgaacggctatcagtctttgcacaccagcatgatcggcccgcacggtgtgccggttgaggtccagatccgtaccgaagatatggaccagatggcggagatgggtgttgccgcgcactgggcttataaagagcacggcgaaaccagtactaccgcacaaatccgcgcccagcgctggatgcaaagcctgctggagctgcaacagagcgccggtagtagctttgaatttatcgagagcgttaaatccgatctcttcccggatgagatttacgttttcacaccggaagggcgcattgtcgagctgcctgccggtgcaacgcccgtcgacttcgcttatgcagtgcataccgatatcggtcatgcctgcgtgggcgcacgcgttgaccgccagccttacccgctgagccagccgcttaccagcggtcaaaccgttgaaatcattaccgctccgggcgctcgcccgaatgccgcttggctgaactttgtcgttagcagcaaagcgcgcgccaaaattcgtcagttgctgaaaaacctcaagcgtgatgattctgtaagcctgggccgtcgtctgctcaaccatgctttgggtggtagccgtaagctgaatgaaatcccgcaggaaaatattcagcgcgagctggatcgcatgaagctggcaacgcttgacgatctgctggcagaaatcggacttggtaacgcaatgagcgtggtggtcgcgaaaaatctgcaacatggggacgcctccattccaccggcaacccaaagccacggacatctgcccattaaaggtgccgatggcgtgctgatcacctttgcgaaatgctgccgccctattcctggcgacccgattatcgcccacgtcagccccggtaaaggtctggtgatccaccatgaatcctgccgtaatatccgtggctaccagaaagagccagagaagtttatggctgtggaatgggataaagagacggcgcaggagttcatcaccgaaatcaaggtggagatgttcaatcatcagggtgcgctggcaaacctgacggcggcaattaacaccacgactagcaatattcaaagtttgaatacggaagagaaagatggtcgcgtctacagcgcctttattcgtctgaccgctcgtgaccgtgtgcatctggcgaatatcatgcgcaaaatccgcgtgatgccagacgtgattaaagtcacccgaaaccgaaattaatgttttatgaacccaacacgttatgcacgcatctgcgaaatgctcgccaggcggcagcctgatctgaccgtctgcatggagcaggtccacaaacctcataacgtttctgcgattattcgtaccgcagatgccgttggcgtacatgaagttcacgccgtctggcctggtagccgcatgcgcaccatggctagcgcagcggcgggtagtaacagctgggtacaggtgaaaacacaccgcaccattggcgatgccgtcgctcatctcaaaggccagggcatgcagattctggcaacccatctttctgataacgctgtcgatttccgcgaaattgattacactcgcccgacctgcattttgatgggacaggagaaaacgggcatcacgcaggaagcattggccctggcggatcaggacatcatcattccgatgatcggcatggtgcagagcctgaatgtttccgttgccagtgccctcattctttacgaagcccagcgtcagcggcaaaatgcaggcatgtacctgcgtgaaaacagcatgttgccggaagcagagcaacaacgcctgttgtttgaaggcggctatccggtgctggcgaaagtcgcaaaacgcaaaggcctgccttatccccacgtcaatcagcaaggcgagatcgaagctgatgccgactggtgggctactatgcaggctgcagggtaagtgccatgaaaggtcgcctgttagatgctgtcccactcagttccctaacgggcgttggcgcagcacttagtaacaaactggcgaaaatcaacctgcataccgtgcaggatctactcttacaccttcccctgcgctacgaagatcgcacccatctctaccccatcggagaactactgccgggcgtttatgccacggtggaaggcgaagtgctgaactgcaatatctccttcggcggtcggcggatgatgacctgccagatcagcgacggttccggcatcctcaccatgcgctttttcaatttcagcgcggcaatgaaaaatagcctggcggcgggccgccgtgtactggcttatggcgaagcaaagcgcggtaaatatggtgcggagatgatccacccggaataccgcgtgcagggcgatctcagcacgccagaattacaggaaacgctcacgccggtttatccaacaacggaaggcgtaaagcaggccacgctgcgtaaattaaccgaccaggcgctggatctgctcgacacctgcgccattgaagaactcctgccgccggaactgagtcaaggaatgatgacgctaccggaagcgttgcgcactttgcaccgcccgccaccgacgctacagcttagcgatctggaaaccgggcagcatccggcgcaacgtcgtctgattctggaagaactgctggcgcacaacctcagcatgttagccttacgtgccggagcacagcgttttcatgcccagccgctgagcgccaatgacacgctgaaaaataaactcctcgccgccttaccgttcaagccaacgggcgcacaggcacgcgtagtggcggagatcgagcgcgatatggcgctggatgtgccgatgatgcgtctggtgcagggcgatgtaggttccggtaaaacgctggtcgccgccctcgccgcgttgcgtgcgattgcccacggcaaacaggtagcattgatggcaccaaccgaattactcgccgagcagcacgccaataacttccgcaactggtttgcaccgctcggtatcgaagtgggctggctcgccggtaagcagaaaggtaaagcacggctggcacagcaggaagccatcgccagcggtcaggtgcagatgattgtcggtacacacgccatcttccaggaacaggtgcagtttaacggcctggcgctggtgattatcgacgaacagcatcgttttggcgtgcatcagcgtctggcattgtgggagaaaggccagcagcagggcttccatccgcatcagttgatcatgaccgccacgccgatcccccgcacgctggcaatgactgcgtatgccgatctcgataccagcgtgatagatgagctgccgccaggccgcacgccagtgactacggtcgctattcctgatacccgccgtaccgacatcattgaccgcgtgcaccacgcctgcataactgaaggtcgtcaggcatactgggtttgtacgttgattgaagagagcgaattgctggaagcgcaggcggcggaagctacctgggaagagttgaaactggcgctaccagagttgaacgttggcctggtacacgggcggatgaaacctgccgagaaacaggcggtgatggcgagctttaaacaaggtgagctacacctgctggttgccacaaccgttattgaagtcggcgttgatgtgcctaacgccagtctgatgattatcgaaaacccggagcgtctgggtctggcgcagttacaccagctgcgcgggcgcgtaggtcgtggcgcggtggcttctcactgcgtgctgctctacaaaacgccgctttctaaaacggcgcaaattcgcctgcaagtgctgcgcgacagtaacgacggttttgtgattgcgcaaaaagatctggagattcgcggccctggcgaattgttaggcacgcgtcagacgggtaatgctgaatttaaagtggcggatttactgcgcgatcaggcgatgatcccggaagttcagcgcctggcacgccatattcacgaacgttacccacaacaggcaaaagccctgatagaacgctggatgccggagacggaacgttacagcaatgcgtaaaaggcggcagtgagaagaccgccatttcaggttaccctaccttcctgccggatgcgattcatcaccctacaaattcaataaattatgaatcaatacgcaggcttgataagcgaagcgtatcaggcatttgtctttgttgcggcggcacttctaccgccgcttcatcggttaaccggcaaaaatcggcaacatcaaatacaacttaattaccagcgcattgacgatatcgataaagaacgcaccgaccatcggcaccaccaaaaacgccatgtggcccgggccaaagcgttcagtgatcgcctgcatgttggcgattgccgttggcgttgcaccgaggccaaaaccacagtgacccgcagccagcactgccgcatcgtagtttttgcccatcatgcgccaggtaacgaagatggcatacaacgccatgaagatggtctgtaccaccagaatcgccagcatcggcagcgccaggctagccagctcccacagtttcagccccatcaacgccatcgccaggaacaagctcaagcttacgttacccagcacggataccgcacgctcaaagacgcggtaaaagcccattatactcagaccgttgctcagaatcacgccaacaaacagtacacagacgaaggtcggcagttcaaaagcagtgccagccaaaagttgcgcaacaattttccccaccgtcaggcagatagcaatcagcgcgatagtttcaatcagcaccaagctggtgatcatgcgtcccacatccggcttttcaaacgccgtcgggacttcctggtcatccggaataccgttcggcgtggtggagtgtttcaccagatagcgcgccaccggaccgccaatcaagccgcccagcaccagaccgaacgttgcacaggccatcgccacttccgtcgcattggtgaagccataacgttcaatgaacaatttactccacgcagcgcccgtaccgtgaccgccggaaagagtaatagaaccggccaacagccccatcagcggatcaagccctaacaagctagccataccaatgccaatggcattttgcatcaccaacagaccaacaaccacaatcaagaagatgccaaccacacgcccaccggcacgcaaactggcaatgttggcgttcaggccaatggtggcgaagaaagccagcattaacggatcgcgcagggacatatcaaagttgacttcccagcccatgctttttttcagtactagtagcgccagcgccaccaacaaaccacccgcaacaggttccggtatggtgtatttcttcaaaaaggagacggaatggaccaacttacgcccgagcagcaacgtcagcgttgcggcaacaagcgttgctaaagtatcgagatgaaacatagttactcctttgtatccgcatcactctttcatactcgtcatacttcatcgcgcagtggcaacttcatgaactatgacgggtatcgagttatgctttcctgggtcaaattctcagctgttaatgaacaaatggcatggattttaagcagaaaaataccaaaagttatataaaaaagtgcatttatctcatttaaatatttagatgaggatgtggcaaacgtttgcttttctctttcggtcagctaaaatgcccgctttgctaccacgggattgttttcgatgtctgtttccaccctcgagagtgaaaatgcgcaaccggttgcgcagactcaaaacagcgaactgatttaccgtcttgaagatcgtccgccgcttcctcaaaccctgtttgccgcctgtcagcatctgctggcgatgttcgttgcggtgatcacgccagcgctattaatctgccaggcgctgggtttaccggcacaagacacgcaacacattattagtatgagcctgtttgcctccggtgtggcaagcattattcaaattaaggcctggggtccggttggctccgggctgttgtctattcagggcaccagcttcaactttgttgccccgctgattatgggcggtaccgcgctgaaaaccggtggtgctgatgttcctaccatgatggcggctttgttcggcacgttgatgctggcaagttgcaccgagatggtgatctcccgcgttctgcatctggcgcgccgcattattacgccgctggtttctggcgttgtggtgatgattatcggcctgagcctaattcaggttgggttaacgtccattggcggcggttacgcagccatgagcgataacaccttcggcgcaccgaaaaatctgctgctggcaggcgtggtcttagccttaattatcctgcttaaccgtcaacgtaacccttacttacgcgtggccagtctggtaattgcgatggcggccggatatgcgctggcgtggtttatgggcatgttgccagaaagcaacgaacctatgacgcaagaactgattatggtgccaacgccgctctattacggtcttggcattgaatggagtctgctgctgccgctgatgctggtctttatgatcactagcctggaaaccattggcgatatcacggcgacctctgacgtttccgaacagccagtgtccggtccgctgtacatgaaacgcctgaaaggcggcgtgctggcaaacggcctgaacagctttgttagcgcggtgtttaacaccttcccgaactcctgcttcgggcaaaacaacggagtgatccagttgactggtgttgccagccgctatgtcggttttgtcgtcgcgctgatgttgatcgtgctgggtctgttcccggcagtgagcggttttgtacaacacattccagaaccggttctgggcggcgcaacgcttgtaatgtttggcaccatcgccgcctccggtgtgcgtatcgtttctcgtgagccgctgaaccgtcgggcgattctgattatcgcgctgagcctggcggttggtctgggcgtgtctcagcagccgctgattttgcagtttgcccctgaatggctgaaaaacctgctctcctccgggatcgccgcgggcggtattactgccatcgtgctgaatctgattttcccaccagaaaaacagtaattcactggcggcggtaagataattaccgccgcagtctcacctctttaaccattcccgccttgaggattgcgcgtaaatcgtgcataactcccttatgtgcatttcacgggatggaagaccatgaaatttattgggaagctgcttctctacattctcatcgctctgttagtggcgatcgctggcctctattttcttctgcaaacccgctggggagcagaacatatcagcgcatgggtttccgagaatagcgactatcatctggccttcggggcgatggatcaccgtttttccgcgccatctcatatcgtgctggagaacgtcacgtttggtcgtgatggccagcccgcgaccctggtggccaaaagtgtcgacattgcgctaagcagtcggcaactgaccgaaccacgccatgtcgataccatcctgctggaaaacgggacgctgaatctcaccgaccagaccgcgccgctaccgttcaaagccgatcgtctgcaactgcgtgatatggcgtttaatagcccgaatagcgaatggaaactgagcgcgcagcgggtaaatggcggcgtagttccgtggagtccaaaagccggtaaagtgctgggtacgaaggcgcagattcagtttagtgccggaagccttagcctcaatgatgttcctgccaccaatgtactgattgaaggcagtattgataacgatcgcgttacgctgactaacctgggtgccgacatcgcccgcgggacattaaccggaaacgcgcagcgtaacgccgacggcagctggcaagtggaaaacctgcgcatggcggatatacgtctacaaagcgaaaaaagcctaaccgacttctttgcgccattacgctctgtcccgagcttgcagattggtcgcctggaagtgatcgatgctcgtttgcaaggtccggactgggcggtgaccgacctcgatctcagcttgcgcaacatgaccttcagtaaagatgactggcagacacaggaaggcaaactgagcatgaacgctagcgagttcatttatggtagcctgcatttatttgacccgattataaacacggaattttccccgcagggcgtagcgctgcgccagttcaccagccgctgggaagggggtatggtcagaacgagtgggaactggctgcgtgacgggaaaacgttgatccttgatgatgcggcaattgccgggctggaatataccttgccgaaaaactggcaacagttgtggatggaaacgacacccggttggttaaacagcctgcaactgaagagatttagcgccagccgcaatctgatcattgatatcgaccctgacttcccgtggcagctcaccgcgctcgatggttacggtgccaacctgacgctggttaccgatcataaatggggcgtctggagtggcagcgcgaatctgaatgccgccgccgcgacattcaatcgtgttgatgttcgtcgcccgagcctggcgctgaccgccaacagcagcacggtgaatatcagcgaactgagtgcatttactgaaaaaggcattctggaagccaccgccagtgttagtcaaacgccacaacgtcagacacatatcagcctgaatggacgcggtgtgccggtgaatattttgcaacagtggggatggcctgaattaccgttgactggcgacggcaatattcagcttaccgccagtggcgatattcaggccaatgtcccgttgaaacctacggttagcgggcaattgcatgccgtgaacgccgcaaagcagcaagtgactcaaaccatgaatgctggcatcgtttccagcggtgaagttacaagcacggagccggtgcggtaaacatcaatctcgccgggtacgactcagacgtacccggcattccatcaatagattacaacgtaattgtcagcgcattcccttgaggcttcaccaccagcccctgctcactttcagcctggctaccgtcttgcagaccatttactttcacaacattgcgcaggcacagtgtccagttcttcgcctcgcccgcaccagtcacagtaatcgtgttgccagtacgtgctgcttttaaagtaaagatcacgcttccgtcagcagcgggcacttcacagacggcttcatgcccgtcttgcagattgaagaggtggaatgccgtgccttcgtgccacacgtaatcgggacgttgatcgttgttgcccagcgccagtagagtgttatcacgcacataaacgggcagactcaggaagccgtgctgctgtttatgccagcgactaccgtcgagttcatcgttgtgccacaggtgtgtccagcgaccttccggcaggtagaactgcacatcgcccgcttcagtgaacaccggcgcaaccatcacgttgtcgcctaacatgtattgacggtcaaggtaatcacaagccggatcgtccgggaactccatcatcatggcccgcatcatcggcgtaccccgcgcgttcgcacgcgcagcttcacgatacagatacggcatcatgcggcatttcagttgcgtgaagaagcgcaccacatcacaggactcatcatcgtaggcccacggcacacgataagatttgctaccgtgtaaacggctatggctggagagcaaaccaaacgcgcaccagcgtttgtaaacgtgcgccggagcggtattttcaaagccgccgatatcgtggctccagaagccaaaaccactaaggccaatagacaaaccaccgcgcaggctttccgccatactttcgtagttagcgtaacaatcgccaccccagtgtaccgggaatttctgcgcaccgacggaggcgctgcgggcaaacaagacagcttcttcctcaccaacggtgtccttgagcacgttccacaccagttcgttgtagatgtacgcataatggttatgcattttctgcggatcggaaccgtcaaaccactgaacatcagttgggatacgttcgccaaagtcggtcttaaagcaatcaacgcccatcgcgaccagacctttcagtttgtcggcgtaccatttgcaggcatccggattggtaaagtcataaatcgccagacctggctgccatttatcccactgccataggctaccgtccgggcgtttgagtaaatagcctttctcttgtaactctttaaagacgggggatttttgaccgatataggggttaatccagacgcagattttcagtcctttcgctttcaggcggcggatcatcccttccgggtcagggaaagtcagcgggtcccactcaaaatcgcaccactggaaggctttcatccagaaacagtcaaagtggaaaacatgcagcggcagattgcgttccgccataccatcgataaagctgtttaccgtcgcttcgtcgtagttggtggtaaaactagtggttagccacaggccgaaggaccacgcgggcggcagcgccggacgaccagtaaagcgggtataacgatcaagtaccgctttcggcgtcgggccgtcgataacaaagtattcgagatattcactctcaacgctgaactgcactttggagactttctcgcttcccacttcaaaagagacacactggggatgattgaccagtaccccataaccacggttagtcatgtagaacgggatatttttatacgcctgttcagtacttgtgccgccgtcccggttccaggtctctaccgtctggccattgcgcaccagggcagtaaagcgctctcccagaccgtaaactgtttcgccaacgccaagatcaagccgctcaaacatataattgcgttgattattcgtgtcctgcacgtagccattatttttcacctgactaccggtaatacgttcgccgttgcgcagaaaatccagactccagaactcacctttgctgacacgcgcgcttaagttgccacttttaaactcagcataacgttctgtgttttcgattgtgaccttcacgtcctgcaaaatattgagcggataatgaggaccgttattcagcgccccctgaaaatgctcaatccgcacaccgacaataccttcctgtggggagaaaaagcgcaacgtaaataaaggcgtatcaagctgccaggtacgttcacgcacatcacggggggcagcatagaccaccatttcattatcctgctgttcaacctcgaacacctgaagcgggtgaatcaaattgaggccaggttgaatcaaccagtttccatcgctaattttcattgccgttccttagttctgcacttcttgagaggtgaattgttgctggcaacggcgtttaccctgagccagctgttccataacggttttcagattgtgcgtcgtgagactgtagtagcgtttagcgataatcgcgctcagcaaataacagatcgccggaacaatcgtgaatagcgcaataatgatgctaatcgtggcgctgttctgcgctttttctgccgcatcatatccgccataagccagcatccagccgataagagcgccgccgaaggccaaccccagtttgagcacaaacagcgtgccagcaaaactgatcccggtcaggcgtttaccattgcaccactcgccgtagtcgacggtatcggacatcattacccactggataggtgtcaccagttgatgcaacacaccaatcacgaagatgaagacaaacatagtgatgctggcctgcatgggaacaaagaacatcgcgaggctaatcactgccagcagggcgttcgtccaccagaagatagtgactttacatttccagtcggtcagaggttttgccagtgcggaaccaatcaggttacccacgcaataagtggtgagaaaagcgacaaacacttccggcgtgcccaaaatccatgtgacgtaatacatcatcgccccaccgcgtacgcacaccgccaggatattgaaaatggttagtaaaccgacaatccgccactggtcgttttgccagatatcacgtaaatcttcccgcatagacgttgttgtaggtggtgcttcaacgcgttctttagtggtgaagaaacaaaatgccagcatcatgaatgccaccacggaaaggaccgcgataccgccctggaaaccgagtggtttattatcaccgccaattaaattaaccagtggcatcatcagaacagtagaaagcatgcctcccgcggtcgccagcacaaaacgccaggattgcaggctgatacgctgagtcgggtcattggtgattacaccacccaatgcgcagtaagggatattgacgacggtataaagtaaggtaagtagggtgtaagtaattgctgcatagatcattttgccgttcatactgagatctggcgtgctataggccagtacacagacgatcccgaatggcagtgcgccaaacagtacccacggacgaaatttaccccagcgagagcgcgttcgatcggccaacaaccccatgcaaggatcggaaatcgcatccagtgcacgagcgaccaaaaacatggttccgacaaaaccggcaggaatgccaaaaatatcggtataaaagaacatcatatataacattacgttatcgaaaataatgtggctggcggcgtctcccatgccataaccaattttctctttaacggacaacacttcactcttcatctgcttttccttgatgctataggggtgctgagaccgataacgcattttgtaaaccatccctgtgagagcgaatattccgatatctggttattaatttatgattcttgttttatgtgatcgtggtagcgttaattccgctcatatatcattgtaaaatatgggttttatatgaactataatgctttcgtgataatacgctgcgtgtattaggcggaaaaaactgatctgggggatgtagaaactcaaggaagtagctataatgcgccccgcctccatgtagcaatcgaggcgcggaagatcgtcgtctccggtgaggcggctggacttcaaatccagttggggccgccagcggtcccgggcaggttcgactcctgtgatcttccgccaaaatgcctctcctgacgttctccaaccccttgtaatactgtcaatccagatattttctactgctcaatattcaatcggcttcaggaatacctggtctaaggttttgtgatggacgatgagcggctgaagaatccgcctgtcggttcttctgtcctcgaacgcatccgcgatattcacgccagtatgcgccgtgtttatttgcaggtgatttgcccccctgctgactctcagccaactgtatcgccattaaggtgaagatgttgttttactcgccccagaacacccttttttatacgactattctatttctttaaccgctggcgaaaaaaactgactataaacttcaccaataatcagactgccatcaagattaatttgttcatttaatatatcaaatcaacttgttttatttttactatcaaaaatagctcattgccttactataattaatatataaattcggtaattaattcttaacatgcttttactaataatctcaattgctggccctataatattgcgctagcattgctttctggttgtatcagcgatactcaaaaattcttaatacaatactcattcgactggtacttatttgtaactcagttatattttttcgcccggtgattcagaagaatgcaaaaaacggctaccactccaagtaaaatacttgatctcactgccgcggcatttttacttgtcgcctttctgacgggtattgcgggcgctcttcagactcctaccctaagtatattcctcgcagatgaactgaaagcccgtcctataatggtaggttttttcttcaccggtagcgctattatgggaattctggtcagtcaatttctggcaaggcactccgataaacaaggcgaccgtaaattactgattctgctatgttgcttatttggagtgctggcctgcacgctttttgcgtggaatcgcaactacttcattctcctcagtacgggcgtacttctgagtagttttgcttccaccgcaaacccgcaaatgttcgccctcgcccgtgaacacgccgacagaacaggccgtgagacggtcatgttcagtacatttttacgtgctcagatcagccttgcctgggttatcgggccaccgctcgcttatgaactggcaatgggatttagttttaaagtgatgtatctcaccgctgccatcgcatttgttgtttgcggactgatagtctggttgtttttgccaagtatacaaagaaatattcctgtcgttacccaacccgtagaaattttaccctccacccacaggaagcgggatacgcggctactttttgtggtctgtagtatgatgtgggcggcgaataatctctacatgataaatatgccgctatttattattgatgaactgcatctaaccgataaactgactggagaaatgattggtatcgctgccggtctggaaattccgatgatgttaatcgcaggctattacatgaaacgtattggcaagcgactattaatgctcattgctatcgtgagtggaatgtgtttttacgccagcgtactcatggcgacgactccggcggttgagctggaattgcaaattcttaatgccatcttccttggtattctctgtggtatcggcatgctttattttcaggacttgatgcctgaaaaaataggctctgcgacaacgttatatgcaaatactagtcgcgtcggctggattatcgccggctctgttgacggaattatggttgaaatctggagctaccatgcgttgttctggctggcgatagggatgttgggtattgcgatgatttgcctgctgtttattaaagatatttaactcaccagtctgggctaagaaaaatcggcgtggcgcaaacagagccatcctcgccatttttgctatcatgcctgcatacataaacgacaaaacagtatgcagagggaaaaatgggttccaccagaaaggggatgctgaacgttctgattgccgccgtgttgtggggaagtagtggggtctgcgcgcaatacatcatggagcaaagccagatgagcagccagtttttgactatgacgcgtttgatattcgccggtttgattctactgacgctgagttttgttcatggcgataaaatcttttctattattaacaatcataaagatgccattagcctgctgattttttccgtggttggcgcgctaactgtacagctcacttttttgctaaccatcgaaaaaagcaacgcagccacggcaacggtgctgcaattcctcagtccgacgattatcgtcgcctggttcagtctggtgcgtaaaagccgcccgggcattctggttttctgcgctattttgacaagcctggtcgggacttttttattggtgacacacggtaatccgacgagtttaagcatctctcctgccgcgttgttctggggcattgccagcgcatttgctgctgcattctataccacctatcccagtacgctaattgcccgctatggcacgttaccagtcgtcggctggagtatgctgattggcggtctgattctgttgcctttttatgccagacaaggaacaaactttgtcgttaacggcagtttgattctggcgtttttttatttggtggtcattggtacgtccctgacatttagtctgtacctgaaaggagcacaattaattggcggtccaaaagccagcattttgagctgtgcagaaccattaagtagcgcgctactctctttgctgttgctggggatcacgttcacattaccggactggctgggaacgctgctgattctgagtagcgtgattttgattagtatggattcccgtcgccgcgccagaaaaataaatcgtccggcgcggcataagtgagaattaccagccaggcaccgcgccaccgttaaaaatggtttctgccgctttagcgacttcgggactttgataagattgcagaaattccttcacgttttctgcattcttattatcttcccgtgccaccaaaatattcacatacgggctattcttatcttcaataaatacgctgtcgtgcaccggagaaagcccggtctgctgaatgtaagtggtgctgataatcgctacatcaactttgggatcatccagtacgcgcgggagctgcgccccctcgagttccataatctgcaaatgacgaggattatcggttatatccagcgcggtaggtaataacccttttccctctttcagagtaattagcttctctttttgcaacagtaaaagtgcgcgaccaaggttggtcgggtcgttggggatcgccactgtcgcgccttcttttatttgcgccacggttttgatttttttggaataacccgccatagggaagacaaacgtatttcccaccgctaccagtttataaccatgcgcctgattatcttgttcaagaaagggtcgatgctggaagacattcgcatcaagttcgccatgatttgtcgcatcgttcggtagcaagctaccgctaaatcctaccagttcaacatcgaggccatatttctcttttgccacctttttagcgacttccgcgacatcttgttctgcgccatttataacgccaactttaatgtgttttgcatcgctgctactctggtcgcaacctgccagcagaattccggccagcaataatgcggcccctgtccgtagatgatgtgttgtcagtttcatttttttatccttttattaatgattacctgactatagcggtaaggtcgctgcggtttaaaaaacgaaacgctatcgataagaataaaaaggaataaaagtggaatataaagtctggcacttcttactgaccacgcaagcgcgtttcgtacagcatgatgagagcgatgaaagcaaactacacttatgcttcattcgatacacatttgtaaaaggttgaatccatgaaaccaacgacactactgcttattttcacttttttcgctatgccaggcatcgtatacgccgagagcccttttagcagtctgcagtccgcaaaagagaaaaccacggtattacaagatttacgtaaaatttgcacgccacaggcgagtttaagtgatgaagcgtgggaaaagttaatgttgagtgatgaaaacaataaacaacatatacgcgaggccatcgtggcgatggaacgtaataatcagagcaattattgggaagcgttgggtaaggtagaatgcccggatatgtaagaacagcaacaactactgaccaacgcttctttacctgatatcaggatttcttcattttcacctttgcagtaaccaacaatgcagtcagcaacatcaatgtgccggacaacatcaacgggctagtcagaccaatattatccagcgcataaccgccgattgccgcgccacaggtattagcaagctgaataaccgccacctgaatagacccggctttttctgcctgatcggccaggctgcgggtgatccacgtactccagccgacgggaaccaatgcaaaagttagcccccagataatcgccacgccggtagcaacgattttatcgcttccccacaacgtcagtaccaacgcactcacagccagtattaacggcgcgcctgctaaggccagttttacgctacgtttaagaatgaagctgctaaggctcgtaccaataaagctggcgataccaaaactcaacagcaccagcgttaagccatccacgccgaatcccgccaggttcatatacaccgggcgaatatacgtgaagaaagcaaactgcccggcgaaagacatgaagatggcgatcatccctgccatcacacccggacgttgtaataagcggaaagtattttgtttctgatggctgggttcgcctggcagactaggcaaacttttgataatccagaaaatacacagcacgcccatcaccgccgccgcattaaagacattgcgccaaccgataagctcgcctaaaaaactgcccaacggcgcggcaatcaccagcgcaatagaaaccgcgccgaagatcacgctcagcgccttcggcaccgtacgcggcggcaccagacgcatggtcaggctcgcgctcatcgcccagaacccgcccagcgccagccccagacaggcacgaccgattaaaagcaaactgaaactgttagcaaaggaaaccagcaagcaggagagcgtcagcaaaacggcaaacaaaataacaacgtagcggcggtcagtagcctgaattgtctgggtaataaacaaactggcaaacattgccacaaaggcggtcacggtcacgctttgcccggcaaccccttcgctaatgcctaaatcctgggccattggcgtcaacaaactgacgggcaaaaactcaacgataatcagacaggcgacacaaaacgccacgctgaaaacggcactccagttcggtcgggtgatggcatccgcgccgcggttttcggcaataaattcactcatggtgttacccgtggcatgtttcaggggaaaagcgctccactttaacatactaatgtgactcgcatttaacgtttttgcaacttttacggtgttgctactgctggagttaagatcgaaacggaacagggcaaagattaccggatgcggcgtgaacgtcttatccacccgacaggtcaggcgcggtctgtaggctgataagacgaaacggtttcaatgcaaccagtgaacgccctcggcaggctgaaagaacgcgttatagcgcatctgaaaagcattaatatcctgcatttcaggttcggtttcgcgcagaaaacctagcgccagcctgacctgagcgtcggtaatcggcgcggcgaggcgagctttttgtaaaatccgatgccattgcagcaggttctgttcgctaccatcgacaatgacaatttgccagatgagcaacacctgcgcggcgttttgcaggtggctctcatccggacgatgcaaataacgtaaaaattcgtcaccagcactctttcccatttgatcgaccatgctctccacgggtacgacatcgatgttcagccgatcgctgagacggcgaatcgcttttctggccccggatgtcagcacccgaaaaccaaccacaaacactaccgccagcgtggcgagcattatccagatcatgagttctcctgcgtaatcagaactcatgatatctggaaaccctcgccagttattaatccaccagaataatcttcagtgcaaacagagctgcgaccaccaccacacacaggttcagatcgcgccagcgcccggtgcatactttcatgatgcagtagctcataaagccgagtgcaatcccttcggtgatgctgaaagtaaagggcatcatcaccgtggtaataaacgcaggcacgctttcggtaaaatcatcccagttaacgcgcgccaggctgctagtcatcagcacgccaacaaagattaacgctccggcggttgcgtaaggaggaactatcgccaccagcggactgaagaacataaccaacaggaacataacgccaaccacaaccgcagtcagccccgtgcggccaccgactgccacaccagaagtactttcaatataggcagtaacagagctggtgccgataaacgcacccgccacgctactgacgctatcaacatacagcgccttattcatattggggaatttaccgttaccatctattaagcccgctttatcagttacaccaattaatgttccactactatcaaataggttgatcagcataaaggagaaaatgataccggcgagttcaagtgttaacgcgccgctcaaatctacttcaccaatgacgccgctaatatcaggcggaatggaatagacgccgctaaaatgaacatcaccgaaaaataatccacagcaagacgtcaccacaatagaaaccagcaccgcggcatgaaaatgacgactactcaacacggttataataaaaaaccctaaaatacctaacaacacgccgtgagaacttaaatcgccaatcatcaccagcgtgtctttattggcgacaataacgccagtattttttaatcccattaaggcgataaataatccaattccgctggtgataccaatacgtaaacttaagggaatgttggagatcatccagtaccggatacgaaacagcgtgagcaaaaatagtccaactgcgccccagaatattgcgcccatcccggtctgccaggagatgcccatcgcccccacgaccacgaaggcaaagaaggcgttcagccccattgccggagccagcgccacgggtaagttagcaaatatccccatcgcaatactgccgataccggcaatcaaacaggtggtaacaaacaccactttcgggtccatttgtgccgcgccgaggatttgcgggttcacaaaaacgatgtacaccatggttaaaaaagtggtcatccccgcaatcaattctgtgcggacggtggtcccatgctgaggtagtttaaataatcggctaagcgtcccactttcattactcacgtaatcggtattgtcattattcatttttttgtccattggaggagatttaatcccttgcttttgtaaaacaaatgacaacaacggttcagtgataattatcacatttcaattgcacattaatggatattctttaataatctcgcgacgtttctttatgataaataataatcaaattgataaaatcaaaatgagaaaaatatgaataattctattaaccataaatttcatcacattagccgggctgaataccaggaattgttagccgtttcccgtggcgacgctgttgccgattatattattgataatgtctctattctcgacctgatcaatggcggagaaatttccggcccaattgtgattaaaggacgttacattgccggtgttggcgcagaatacactgatgctccggctttgcagcggattgatgctcgcggcgcaacggcggtgccagggtttattgatgctcacctgcatattgaatccagcatgatgacgccggtcacttttgaaaccgctaccctgccgcgcggcctgacgaccgttatttgcgaccctcatgaaatcgtcaacgtgatgggcgaagccggattcgcctggtttgcccgctgtgccgaacaggcaaggcaaaaccagtacttacaggtcagctcttgcgtacccgccctggaaggctgcgatgttaacggtgccagttttacccttgaacagatgctcgcctggcgggaccatccgcaggttaccggccttgcagaaatgatggactaccctggcgtaattagcgggcagaatgcgctgctcgataaactggatgcatttcgccacctgacgctggacggtcactgcccgggtttgggtggtaaagaacttaacgcctatattactgcgggtattgaaaactgccacgaaagttatcagctggaagaaggacgccggaaattacaactcggcatgagcttgatgatccgcgaagggtccgctgcccgcaatctcaacgcgctggcaccgttgatcaacgaatttaacagcccgcaatgcatgctctgtaccgatgaccgtaacccgtgggagatcgcccatgaaggacacatcgatgccttaattcgccgcctgatcgaacaacacaatgtgccgctgcatgtggcatatcgcgtcgccagctggagcacggcgcgccactttggtctgaatcacctcggcttactggcacccggcaagcaggccgatatcgtcctgttgagcgatgcgcgtaaggtcacggtgcagcaggtactggtgaaaggcgagccgattgatgcgcaaaccttacaggcggaagagagcgcgagactggcacaatccgctccgccatatggcaacaccattgcccgccagccagtttccgccagcgactttgccctgcaatttacgcccggaaaacgctatcgggtcattgacgtcatccataacgaattgattacgcactcccactccagcgtctacagcgaaaatggttttgatcgcgatgatgtgagctttattgccgtacttgagcgttacgggcaacggctggctccggcttgtggtttgcttggcggctttggactgaatgaaggtgcgctggctgcgacggtcagccatgacagccataatattgtggtgatcggtcgcagtgccgaagagatggcgctggcggtcaatcaggtgattcaggatggcggcgggctgtgcgtggtacgtaacggccaggtacaaagtcatctgccgttacccattgccgggctgatgagcaccgacacggcgcagagcctggcggaacaaattgacgccttgaaagccgccgcccgtgaatgcggtccgttacccgatgagccgtttattcagatggcgtttctttctctgccagtgatccccgcgctaaaactaaccagtcaggggctatttgatggcgagaagtttgccttcactacgctggaagtcacggaataataaaaaaagcccggcgtcatgccgggcaaaagtcaccagttacgtttatgccactgtcaactgctgaatttttttctcgcggcggattttgcgttcttccattaccgccactatcgccatcaggcagatacaaccaatcgcggcgatatccagcgcggcgaaggtgcctgcccagccggtaaggccgaataccggcgtcccatcggcaatcattcccagacctaacttggcaaagctgtcaccaatcaggtaagcaaaggtgcctttaataccatcggcagcgccaatcgcttttttaggtacaaagccaacagcagccacaccaatcaacaattgcgggccaaagaccaggaaacccaacgcaaagagagaagccagatagatatattcgttactggcatgttgatacacaccgagcgtggcgataatcagcgccagcgcgatgcaggccaccaggccacggcgaccgttcgccaggtcagagagccagccccacagcagcgtaccgaccagcgcaccagcttcaaacagcgtaaagccctgaatcgccaccgctttagagagtttcagttcctggaacgcgtatacggtactccactggtcgataccaatacgtaccacatagaggaaaatgttggcgaagcacagcagccagatcactttgtttttcagcacatactcaacaaagatctgccacttggtcatatcggtagattctgtctctttgtcctcttcgctgatctcctcgccgaacagttcttcagctttgccgaggccataagattccggggagtcgctgccgtaacgcaggccgataaaaccgacaatcagcgcgataatgctcgggaagataaacatgccgatgacatggccatcgaacaggtaatttgccccgaacagcgccacacctgctgcgcctgcaccgccaaggttgtgagaaatattccagaaaccgaggaatgtcccgcgtttacgacgcggcgtccatttggtgatggtggagtaactgcagctaccgccggtactctggaaaaagccgcttaaggcgtagaaggcaatcatcaggaacaggctaacgctgccgctgcccatactggcactgaagcccagcatacaaatagcagagaggatcagcatgaacggcaggaattgtttggtgtttttgccgtcggcgtagtaggaaaccagcgttttacccacgccataagtgatggagaaacccaggccgatcatccccagctgcgtcatgctcaacccgtaggtgctaatcatatcgttctgcgcgatgttaaagttcttgcgaatcaggtacatcgtcaggtagccgataaagaccaccaggtaggattgcatgaacggtttgaaccacattttgcgccgcacttcgagcggaaggtccagggtcggcttgcgaacctggtttaagaaagccagcatgggttactcctgaaatgaatacctgcgtgaggcatgcattgtaaaaatcagcagcaaatcaggcctgagatagcgtccaggcaaaacctggaaaatttcttagttttgccggatatgaagtgaaaaggtgagatgcatcacgcttcgcgcggtgtctgggcgttcaaaaagggcagtaacagcagtgcggaaatcccggcggcgatagagataaccacaaaaaatccgctccagtgccaggtatcgagtactttcgccagcggccaaccagcaaggctcgcccccagataagcaaacaagccgacaaaccccgtcgccgcccctgccgcctctttgtgggaacactctgccgccgccataccgattaacatctgtgggccaaagacaaaaaaaccaatggtgaagaagcaggttgcctgcatcacgtagctggcaaatggcatcagccacagggagccgacactaagcaaaattccggcggcgaaaatcaaattcatcggccctcggttgccgttaaacaatttgtcgctgccccaaccggctaccagcgcaccgataaatccgcccagttcaaacatcgtcactgccgtattcgccgtgaccagatcgacgcccagtgtctcggacatatacaaattgccccagtcgttgatcgccgcccggaccacatagaccagcacatagcaaaagctaagcagccagatatacggattcagcaacacatatttggtgaggatctctttacgcgtcaaccctgccccttcttgttgttgagcaatttccagcgcgtcgtgtcgccattcaccgaccgccggtaaacctaacgcctgcgggcgatcgcgtagccgccagcagagaaaaatccccacgactatcgccatacaaccagcaatcatcatcccggcacgccagccgtaatgcagcgcagccgctgccatcacaatgggaatgagtgcgccgccgacgttatgcgccgtgttccataatgcccaccaaccgccgcgctcggtacgactataccaggccgttaacagacgcgcacacaccggactaccccagccctggaaaaaggcgttcagcacccagagcacggcaaacgcccataggctcgtgctgaagccaaacagaatgttgataatgcccgtggcgataagccctatccccataaaataacgggcattactgcgatcgctgacaatgccggagacaaacttgctcacgccataggtaatgtaaaacagggtcgctaacaggccgatatcgctacggctgagcacgccgttagcaaggatttctggtacggcggcgttaaaacttttccgcgtgaagtaaaacagcgcgtaacccagccagatggtcagcagaatatgccgacgccagtagcgatagcgggcatcaatttcatatttatcagtcattaatggcgcatcggcaggcgctttcagaaacggcaacatcatcaaaccttagacatagcgttgaggtagagaaacgctgacacgcgtgccgtgcagacaggaaatgtgtaatgtgccacccagcgccgttacgcgctcgcgcattccggtgaggccaaaaccttgttgcccggaacccggcggcaaaccgctgccatcgtcttcaataaccagcatcaaccgttcatcctgctgccagccttgcagggtgaccgcgctggcatcagcatgtttcacaatgttgttcagcccttcctggcagacacgaaacagcgtcacgcgctggttttcgcttaacgcactttcatcgattcgccattcgagatggctgacaataccgcgcccttccagctccatttcccgcatcagactgcggatggcctgctccagggtgagatcatccaactggcgcggacgtaaccgacccaacaaacggcgcaccgcgtcgtaaacgcccaggcttagttgttcgatgagctgcccgctctgcttcacgctggcgttatctgccgccagccgctgaacaatgcccgcctgagtacgaatagcagtgatggtctgaccgatatcatcatgcagctcacgcgccacatcacggcgcacgctctcttcggtttccagcaaccgttcagccagatgctgattgcgcgccagttccttttgcaggctctggttaagttcacgcaaccgctggatgccagcgccaagcaacaaccctgtcagactttgcaccagcaggctgagcaataaatccaccggatgatcgcgccaggtttgactggcgatcagcgcgatggcgttcatcaacgtcgcaatcagcgccccttgccaaccatagtgccaggccagcgcgataatcggcagcgccagacagaatggcgtaaagcggctcagttcgtccggcaatcccaactggagccagagactgataacaaacagcagcaagtaccagaccagatgtcgcccgcgccagttgattggctgagaaaccagactcggaccgagcggcagccaggtgttattggcgagatagtgccagaacaccagacatatcggggccagcgtcaggccgccagttaaagtcagcaacagcgcattccagctctctttgccgtgccaaagccagggcaggctctgcaacaacgccgccgccgttaacgccgccccctgtaacagcaaggtgcgccagtcacgctgatggcgatagcggctgatcagcgctacgggcagtaacgtcagtaaactaccgatcatcaataacggaaaatgggttaaaccgaccgcctgcgttagccagtaaatcagcagccactccgcgcccagcaatacgggccagtatccgcgcgggcattgcagcattagccccagacgcagaccaaacggaaataacagcaccgccatatcagggcgctcaaccagatgcaggctgatactccacaggcaaaaccatgcggcagagaagataaaaaagcaggcaataacggtaattaagcgggagaacaacgtcttcatcaccagccatcaaacatgcggcgcgccagctctacgtcgttactgacgcccagtttttccatcagattggcgcgatggacgtgtaccgttttcggactcaagcccagttcggcggcaatctctttcaccgccattccttgcgccagtttttccgccacctggcgttcacgtttggttagcgggtcctgacgaccggatgccagtttaatggcaatatccggcgtcagataacagccgcccgtggcaaccgtatgcaccgcagcaatgagttcatccgggctacagcgtttggaaagaaagccgcgtgcccccgcgttaagcgcctgctcaaccagcgcaggactgtcgtgaacggagagcataatcgtcgccatacctttcggcagctggcttagcagctccagaccggagatatcgggcatggagatatcgcaaatacacacctgcacaccgcgccccggcagccccgccagcgcctcgcgcccgctaccaaactcggcaactacctgcaaatcaggttccagccccagcagctgcgcaaagccggagcggacgatgaggtgatcgtctataagggcaacggtgatcatggtcttgtcctggcgggtaaaaaaaatacgcgcttaccttaacgataagcgcgatgttgttcaagccttgagcggttactgaaaaaacaccgcgatcttgttaaacatcgtcggatcggactgattacgctgcactttcacgacatcttccagcttatcgatttggcttatcatctgctccagacgctggtcgtcattgaccagtagccagatatggcttttgtcgctgtcctgaatcggcagacaaagaatgccttcaacgttaaaagcgcggcgggcaaaaaggccacaaacgtgggtcattacgcccggatggttgcgaacggtgagctccagaattacgttgtcatgagttgtgttttgcatggcttattcccccaccatttcagtattcgccgcacctggcggcaccatcgggtaaactttttcttcggcatcaatgcgcacatggatcagcgccgggccagggcgattgatgatttcctgcaaactagcctgcggatcggcttcgttattcaaatcacaggtttcgaggccgaatccggcggcaatctgcataaagttgattttgcccggataggtggcggcaaaaacgccttgctcgtagaacagactctgttgctgatgcaccagccccagcgcttcgttgttcatcagaatgattttgacatccagctgattttcactggcggtcgccatctcctgaatattcatcatcaggctgccgtcgccggagaaacacaacactttgcgatccgggttcgccagcgcagcgccaatcgccgcaggcaggccaaaacccatcgtgcccagcccaccggaggtcagccactggcgtgggcgattgagcggataagcttgcgcggtccacatctgatgctgaccaacgtcggtggtgataattgcattgtcatcgacacaggcggcaacggcgttgatcaggccgtaatggcttaacggatcgcacgctttcgggattggacacggaaactcacgctgcaaatccgctaccaactggtgccactctgcacgcggttgcgcttccaccagcgggatcaactgcgccagcacgtcatcaacatccgcctgaatcgccacgtgcggctgcttgattttacccagctctgcacggtcgatatcgacatgaatgattttggcattcggacagaactgctcggttttgccaatcgcccggtcatcaaaacgcgcaccgagcactatcaacaaatccgcctcctgcaaaatatagttggtgctgcgcacgccgtgcatccccagcatacccaggctcaacggatgcgcttttggcaacatgcccagcgccattaaagtcatggtggtaggcagttgcgctttctccgccagttcacgcacccgtgcgggcgcattgatcacaccgccgcccagataaagcaccgggcgtttggcagcgttaatcatcgccgctgcgtcacgaatgctttcttcgctaaaggcgggggcggcggctttttctgccatagcgggctgtgtttcaatctcaaaaactgccgtttgcacatccttaggaatgtctatccacaccgggcctgggcggccactttgcgcaatgcggaaggcatcgctcatgacctgcgggagttcttcgatatgtctgaccagatagttgtgtttggtgatggggatagagatgccgtaggtgtccacttcctggaaggcgtcggtgccgatcatgctggcgggaacctgaccagtgatgcaaatcagcgggatggagtccagccgcgcatcggcaatggcggtcaccaggttagtcgcacccggtccgctacaggccatacagaccgccggtttaccgtcggtgcgcgccattccctgagcgataaagcccgcgccctgttcatgacgggccagaatatggcggatttgcgtgctttggcttaaggcatcgtaaacaggcaggatagaaccgcccggaatgcctgtcacaatcttaatgccctgctgttccaggaaatgaacgataaattctgcgccggtaaagcgcttacgcgtgcttgttgtgccgctacttgccatgctccagtccttttcttctgggccgactttccgggaggtgcttaaacgaaaaaccccgcccggtttgcgccggcggggttttggaatcgtgtgttgttccagtccttacggcgcattgccgacgaccaccaccacacgcacgacgaccactgcggcggatggcgcagttggtagtagttttgcgttgagcatggaagtagtcattggggaccttgttggttttgtgtttaacaatatttatacaagcacagctttacaggggagacaatggaaaatttttcagcaagggaaaattgaggggttgatcacgttttgtactgaattgcagataacaaaaaaccccgccggagcgaggtttcgtcagtcgcctgcggctggtaaccgcaaagcacactgtattatgtcaacactgaaagtatacgtgttccgcgcagaacgcgcaatttcggcacgaattttgacgtatttagtgcatagttgagtatcgatcacagtttgcgttttgtccaaatattactgtttatttatacagtaaacttctataatatcactgtacgcaatgtgttatgcgggggccgcatcgttacccggcgcactaagtcctggctgaaacgggtggtgccgtcagcgccttaaccccgcgtgagcacactgtgttatgtcaacaagcacaacgtttctccttgagataccgcgtgcacaacagctggcaacaggcagcggaaaggtacgtcagctggcagtgctcctgaaccacaggagacgcgtatgaacctggtggatatcgccattcttatcctcaaactcattgttgcagcactgcaactgcttgatgctgttctgaaatacctgaagtaattcagattcaagtcgcaccaaaggggagcgggaaaccgctccccttttatatttagcgtgcgggttggtgtcggatgcgatgctgacgcatcttatccgccctaccatctctcccggcaacatttattgccgcttttgtttacatattctgccgctaaacaattccccattcctggcgtatatctggctaacattcatcaatgtgatagattcctctcccgcatttatgggaatgcgtagtgacttattctaattatttttataaaagcatccgtgataatgaaaaggcaaagaaacgtcaatttgttattgatgttggtattactcgtggccgtcggtcagatggcgcaaaccatttatattccagctattgccgatatggcgcgcgatctcaacgtccgtgaaggggcggtgcagagcgtaatgggcgcttatctgctgacttacggtgtcagtcagctgttttatggcccgatttccgaccgcgtgggccgccgaccggtgatcctcgtcggaatgtccatttttatgctggcaacgctggtcgcggtcacgacctccagtttgacggtgttgattgccgccagcgcgatgcaggggatgggcaccggcgttggcggcgtaatggcgcgtactttaccgcgagatttatatgaacggacacagttgcgccatgctaacagcctgttaaacatggggattctcgtcagtccgttgctcgcaccgctaatcggcggtctgctggatacgatgtggaactggcgcgcctgttatctctttttgttggttctttgtgctggtgtgaccttcagtatggcccgctggatgccggaaacgcgtccggtcgatgcaccgcgcacgcgcctgcttaccagttataaaacgcttttcggtaacagcggttttaactgttatttgctgatgctgattggcggtctggccgggattgccgcctttgaagcctgctccggcgtgctgatgggcgcggtgttagggctgagcagtatgacggtcagtattttgtttattctgccgattccggcagcgttttttggcgcatggtttgccggacgtcccaataaacgcttctccacgttaatgtggcagagcgttatctgctgcctgctggctggcttgctgatgtggatccccgactggtttggcgtgatgaatgtctggacgctgctcgttcccgccgcgctgttctttttcggtgccgggatgctgtttccgctggcgaccagcggcgcgatggagccgttccccttcctggcgggcacggctggcgcgctggtcggcggtctgcaaaacattggttccggcgtgctggcgagcctctctgcgatgttgccgcaaaccggtcagggcagcctggggttgttgatgaccttaatgggattgttgatcgtgctgtgctggctgccgctggcgacgcggatgagccatcaggggcagcccgtttaagcgcacgtcaccgcagcatcgtcatcagctccatgggagaacgatgctgctttatcagatcacgcatcacccgcatatgcggtgcggagtaagaataaaacgcctgatagcccgcacaaagcacgctgtctggcgtctcctgccgagcgtgcgggcacaggcgatgccagtcgcacgcctggcagtcacagcgcggttgcgggttttcgctgccacaccatttttgtaaggtggcgtcaaaaagctcaatgctgatacgactgatatctgcccgcacccaacactcgaacagggcaattaaaaatttcccccacagctctgctgtcacgctagcggccgtcagatcgccccggtcatcaaattcaagatagggaatgagctgtacggagcggatgccccgctgtttgaaattgtgataaaaatcggcaggttgcagagcatccttgtactctacaaccagtttatgcctgtcctcttcagcatcaatgacctgacttcctgtcatgcgactctctcaataaatacgataagttgatgtatatgcgttacagcaaacagtattgcgagagataacaccgcgagggagatcaaaaatttgtcacggactacgtgaaattgggaaaaatcgctattcgtgacatccattaaattgcgattacgggtgtagtgccagaggatcagcgccacgatggcgagaatgccaatgctaatccagaataacatgcccgcctggtgccagttgtgtttgatagccaacgccatcaacgcgccgtagcccagcatggtacgaaaccacgccagacttgtgcgctccggctgcagtcctgggtcggcaatgcgtctggctttgcggctatccggcatacaacaccagtcccataacgttaattatccggcatacaacaccagtcccataacgatcaccgccacgaccatcaatattaagctaatgattaataagctgttggtgtagggcaggtcctctttcagacgcatcgctttttcattgcgtaaccagcgcaagtagccatacatcgctaacccgccggaaaacagacacaacaacaacgccagcagttcgcgaatgacgggcgtggcgaaatctggcgcaagttgatcaagcccaacccccgccgccagaaatcctagtgcagtacggatccacgccagaaaagtacgctcattagccaggctgaagcggtaatcaggcgcttctccgaggcgggaaattttcattgttgctcctttgcaatttcactaacgctctacctttagcggtttttttaagaatttcgtccgcccgtttcctgatatgcttttgccatccgctacaaggaggtcagatgggtatcatagctcaaaataaaatcagtagtttgggcatgctgttcggtgccatcgctttaatgatggggattatccactttagtttcggccctttctccgcaccaccgccaacgtttgaaagcatcgtggcggacaaaacggctgaaattaaaagaggtcttctcgccggaataaaaggcgaaaaaattaccaccgtggagaaaaaagaggacgtagatgtcgataaaatcctcaatcaaagcggtatcgcactggccattgctgcgctactttgcgcatttattggcggtatgcgtaaggaaaatcgctggggcattcgcggcgcgctggtttttggcggcgggacgctggctttccataccttgctttttggtatcggcatcgtgtgcagcattttgctgatattccttatcttttccttcctgaccggcggtagtctggtttaagcagcctgaataatgcccgccgggtgatcatcagcgggcattatcgtcagaacttctgttttttctcctccaccttcaccccttgtgtcggtaggccggtgtcatagtcgcgtacaactgggctatagccatcttgtggacgtggacgaaacgcccccatccagcgcggccgtgcatctttacgccacggacgcagactccattggtaactgcggaacggatcgcgaattttgtccatgtaatccaataaggcgtcatgcattttgctgcgaacgtctgcaaaacggatatcatcgatcaggttatgcatttcatttgggtcattacggcgatcgtaaagttcatcactggtgaagaggttgagtaccagtttaaagtcatccgtcacccagcaacgcaccggaataaaaccgccaaagctgtcatgctcaatctcgtagcggttaaattccaccatcacgccgcgtggctctttcacggcaaggatattttcccccggcagaatctctggtttttcaatatctgccagcgccatcattgtcggcagtaaatcgatatgactgactggcgtatcgacctgtcgccgctccccttgcgggctacggatgatcagcggaatgcgggtgatgtcgtcatacatcgccgcccctttactgatcagcttatgtgcgcccatcatttcgccgtgatcggaggtataaataacccacgtattttcacgttgctctggcgttaaggcattgatgacccgtccgatttggtcatcaacaaagtcattacaggcaaaatagagcggatggtgataaagcccgtcatcaccgactgggcttggcatcgcctgcgcccataagcggtgatgttccggtttgttagccaggtcatcctgtgctttctcgcccagctcgtagtaaaaatcagcgtatttctctaaatactccaccggacaggtgaacgggtgatgcggctcatcatagctaaccaccatcaggaaaggctcgtctgcgcgcgcaggctgttgcagaaaatccaccgcccgattgctgatacgatgcgcccaggtgaaggtttcgtcgatatggttcgcctgtaaatcttcgacgctgtttaggccattgcgccacaggctaatctctttttccgtcagttcgctaagatagttcgccccatcgaaccagtaatcagcgtcccactccggcggacactcgccagtgccgaaatagtcatgaccgtcgagatgccatttgccgatgtaacaggtgtgatagccggcatccttaaagtagcgccccatagtggagatgtttttgcctggcgcgacgttgttggtccacgggccggactggttagcgtagataccggtaaatagtccggcccgtgcaggcgtacaaaccggactacaggtgtaggcggaattaaagcgaataccttccgccgccagactatcaatattttgcgtattcagcggtttaccgctatagcaaccgaccatattggtggcctgggtatcggtcatgacgaacagaaaattggggcgtttcataggctatccttcccgtcgggagtaaaggttacggctgggtcgtgacgatgccgccagctgtcaaaaatcaggtagacaatcactacggcggcaatgaaataactgatcatcgctaaccagcgcgtaccgtagccgccgaattcagccagcccggcatagacgccaatcatcgcgaacaggatgccaatactcgcgatcttgacgtttttccacggtttcatgtccaccgcaaacgcatctttgaaggtgaacggcgtggcgcgcggtttgataaaaccgatcaccagcatcacgaccacgttgatgcagaacgtacaggccagcacatagaggaaatggaagtcgaacttcaccagatagttgatggtgatgtagctgattatgccaatccccatcgctacttttgccgccagcgccgggatgcgcgggaagaaaaagcccataatgatgatggtaaccagcggcacgttgtaaatgccgttgagctgtttcatccagctatacagcccctgcggcgcgttggcgatccacggcgcgaccagcacgctaacgatagcgataaagaaaccaaatttgcgcccgacggtgaccagctgctgcggctcggcattctggttaatgatgcgacggtaaatacccatactgaataacgtactggcgctattcagaaagccgttgaaggtactgatcaccgcaccaaataacaccgcgccgaagaaacccaccattggcactggcagaacgttattgaccagcgtcgggtaggccatgtcggctttcggtaaatcctgatacagatgaaacgcaatcaaccctggcagcaccagtaccagcgggtcgagcattttcagcaccgccgttaacagcgcccccttttgcccttccgccaggcttttactcgccagcgtgcgttgcacgatgccctgatttgtacaccagtaaaaggtgttcaccagaatcaaaccggtaaatgccgcgccaatcggcaagggatcggtcgggccaccgatactgtttaatttctcggcgtgaacggtggtgagttgctcaatgccctgcataaagctgcccttgcccatcgcgattaggccaaataccggcaccatcaacccgccgataaccagcccaataccgttgatggagtccgccactgccattgcgcgcagtccgccgatcaccgcatacaaaattcccgccagaccaagcaaaattaccagtagccagatagccgcaccgtgagaaatctgtaggctttccccgacgtgaaacaggctgttgagcgccaacgcgccggagtagagaacaatcggcagaaagcagacgccggtggcaattaggaagcagaagtcgatgataatacgcgtcgttttatcataacgttcctccagaaaatcggggatggtggcaatgccgcgcttcagatagcgcggtaaaaagattagcgcgaggaagatcagcgtcaccgcactagtcacttcccagcccatcacgctcatgccgcttttgtaggcctgcccggaaaggccgaccagttgttccgtggaaaggttggttagcattaagctagcggcaataaccggcgcttttagactacgtccggcaagaaaatagccttgttggcttccggtatctgttttgcggaccttccaccaggtgatcaccgccaccagcagcgtaaaaccgacaaaactcaagatttgtaagctattcatctcatagcccttatttatgtttatgtcccggacgcatgaatatagggagaggtaaaatgcgtcgggtcaggcagtcagattcttaaaatacaaacgtcgtatccctgaacggattgttttctgttaagttcaggttgtgagcataattcgccggagggatattaaaatgaatggaaaattgcaaagtagtgatgtaaaaaacgaaactccgtacaatattcccttattgattaacgaaaatgtgatctccagcggaatttctctgatcagcctctggcatacctacgccgacgagcattaccgggtgatctggccgcgggacaagaagaaaccgcttatcgccaacagttgggttgcggtgtataccgtacaaggatgtgggaaaattcttttaaagaatggcgaacaaataacactgcatggcaactgtattatattcttaaagccaatggatattcactcttatcactgtgaaggtttagtctgggaacagtactggatggaatttacccccaccagtatgatggatattcccgttggtcagcaaagcgttatttataatggcgaaatttataatcaggaactcaccgaagttgctgagttaataactagtccagaagcaataaaaaataatctggcagtcgcttttctgacgaaaattatttatcagtggatttgtcttatgtacgcagatggtaaaaaagatccacaacggcggcaaattgaaaaattaattgccactttacatgccagtctgcaacaacgctggagcgtagctgatatggctgccacgatcccctgtagcgaagcctggttgcgtcgtctgtttttacgctataccggcaagacgccgaaagaatattacctcgatgcgcgtctggatctggcgctaagcctattaaagcaacaaggaaacagcgttggcgaagtcgctgatacgctcaacttcttcgactcctttcatttcagcaaagcctttaaacataaatttggttatgcgccgagtgccgtgctaaagaatacggaccagcacccaacggatgccagtccacacaattaacgtaactctggccagtacgctttgttggcctccagcaactcatccagaatagctttggcgacgctggcgctcggtaccgttttgctcaacgtaatcgcctgccacaggtgctgataactacgctgttcccaggcgtccacgaccagtttttccaccgccacttgctgactcattaaccctttctgaaactgcgggatatcgcgctccaccagtggttcaggccgtagtagcgcacgcgcatctgtttgcgatcttgcagcccaacaatttgcgccatccggctttcaataccgattggcatgtcacagatgttgaggattttcgcattcgggcgcagacgacgcgtggcttctgcgacaatggctgccgggttggagtagttgagcatccaggcatttggactatatttttccatataatccaccagttccaggacgccgccaatggaacgcatgccgtacgctattccgccgggtccgcaagtttcctgaccaacaacgccgtggcgcagcgggattttttcatccagttcgcgcatcgggtatttgccgacgcggatgtgcgccatgacaaaatcaacgtcgctgaatgccacttcaggatcggtggtgtaactaaacgcaatgtccggcgctttttctttaaggatgactttacaggcttcggcaatcacttcctgccgcgcaccatcgttatcataaaatttcagtgcacgaagcgggaaacggtcctgattcgccaggagcatcaacacgatgcctggcgtaaaggtgcttccaccgcctgcgacaaccacactgaatttggtcattatactgcctccgtaatggcaacattttctgcactttgatgagaattaattaagctatcgagctgttcacgcagctgagatacatgcagaccaatgatcacctgaatggcatcgccactacggaagacgccgtgcgctcccagctttttaaagacttcgtcatccagcgtttgactcatgtcatgcagtgcaatacgtaaacgcgtcgcgcaattgttaatgctggagatattgccgaccccgcccagggcttgcaggataccggcagcctgatccagctcttttttttggctctgccgcggtggtttggcctcggctggctttgtattcggctttactgtagagtttcacttccgcatcttcacgtcccggcgtgcacatgttgaactgcagaatcagtgtgcggaaaaccacgaagtacagcagggtaaagcacaacccaatggcgatttgggtcagcatcatatccgcgtggttgctgaacatcgggatccagttttgcggtaaaacttagtcaatcagacctccgcccatgttgcccaccacaccaaagagatacattacggtgctcatactggccgccagcacggcgtgtaccgcaaacagcaacggactaatgaacaggaaggtaaattccagcggttcggtaattcccaccagcatggcggttaaggttgcgggaatcagcaagcccgccacttttacccgattttccggtgcggcagtgaagtacatcgctaaagaaatgcccacggcaccaaagattttactgttaccgtgcagggcaaaaccgccttccgggaacaagcttttcagcggctcggcgctcaaactgaactcttgcagatgctgcgcccagtacatctgaatgccgccttcaacagctgccggaccaaagataaactgtccgtagatgaagtggtgtaaaccggttgggatcagaatacgttcgaggaaggtgtaaacccagaccccaagtgcacccgcgctacgcaggaacgcttgcagagattcaatccccatttgtacttttggccagccgagcaacgtcagccaggcacaggggatcatcaccaggaaggcgataatcaccacataagacgtcccctggaaaatgccgagaaaaaccggcagttttttatcgaacagacggttatgcagcgccgtcacaatgccggaaatgataattgcgccgataatgctggtatcgagggttttaatcccggccatcattgtcagaccgctacctgccaccgcgtcctgagtgaaatcgacgccgaagtagcttccccaggtcattcccatcgcgttgatgaaatagttccaggtcaggaaactcaccatcaccgccagacaagcacgcccctgcgcttgcttagcaaggccaatgggtaaaccgacagcaaaaatcagcggcatattacggaataccgtccaaccgccctcttcaataatgtgtacgatttgcgcgaataaactgttcggatcggtcagactttccccgacaaacatcgggttttgcagcaagatggcaagacccaccacaatcccggcgaagggaaacagcagcactggcgtgaacatcgcgccgccaaagcgttgaatttgactgagcatttccacatcctcttttctcaattctgtaagtaggaagcctgattggttatgcggcaggcctggagcgaggataggaagatgcgatcggcagaacatgacgacccaatgggattcgtgatcgctttcatgcttttcgttgggcggtagagatctacgttttcgcgaaaaagtagacctctgtgagcacaggtacacagcatcgaacacatctttaaaaaaaagatgttttttcaatcgattaagcagaacttgtgtgcgcattacccgggcttgcaggcaaaaaagagatctagagatgatctacaaaagcattgcggagcggttaagaattcgacttaactccgcagatttcacgctaaacagccttcttcccggtgaaaaaaagctggcggaagagtttgcggtaagccggatgaccatccgtaaagccattgacctgctggtagcgtgggggctggtggtccgccgccacggtagtggcacttacctggtgcgcaaagatgtactgcatcaaaccgccagtctgaccgggctggtggaggtgttaaaacggcagggaaaaacggtcaccagccaggtgctgatttttgaaatcatgcctgcgcctccggccattgccagccagttacggattcaaatcaacgagcagatctacttctcccgtcgcgttcgttttgtggaagggaaaccgctgatgctggaagacagctatatgccggtaaaactgttccgtaatcttagcctgcaacatctggaagggagcaagtttgaatatattgaacaagagtgcgggattttgattggcggtaattatgaaagcctgacgccagtgctcgccgatagactgctggcgcggcaaatgaaggtagcggaacacacgccactgctgcggatcaccagcttgagttatagcgagagcggggagtttttgaattatagtgtgatgttcagaaatgccagcgaataccaggtggagtaccatttacggcgactccacccggaaaagagttaaccgatactccagaagagcaccgccagtaattggggggtgataatgcgcaggaacattaccaacggatagacagtggcgtaagagagcgccgccgcaccgctggttggatgaagattattagcaaacgccagcgccggaggatcggtcatggaacctgccagcatcccgcacatggtcaggtaattcattttggctaacatccgcgccagaatgccaacagtaatcagcggaacggcggtgatcagggcaccataaccaatccagcttagcccttcgccattgaccagggtattcacaaaatccccaccagatttcagaccaacgacgctgaggaacagcacgatccccagctcccgcagcgcgaggttggcgcttggcggcataaaccagtacagcttgccgatactgccgatacgcccgaggatcaacgccataatcagcggtccgcccgccagccccagtttcaacgcggccgggaatcctggcacaaagacgggaatagaacctaacaatacgcctagcccgatgccaataaacactggcagcatctgaacctgttgcagtttttgctgcgcattccccagcacattggcaacggcatcaattgcggacggacgccccaccagattgaggatatcgccgaactgcaggctgatatcgccactggcgaccagttcgaccccggcacggttcaggcggctgataacaacgtcatagcgttctttaaagtgcaggtcgcgaatacgttttccgagcacgttttcattggtgaccaccacacgctcgacgcgcaaatcagtgcctttcgtggacaggctagtatcgacctcctgaccaatcaccagttgcgcattatgtaaatccgctggctgacccaccagatgcagcaaatcgcccagttggataatggtatctgggctaggaacttttagggtttcttcgcgtttcagacggctgcagataattttgtcgccgttgagaatcggtacatctttaatggctaaatcatgcaggttagggttctcaacgcgaatattgatagtcttgatcagcgcgccgccattggtgcgactagactcgtgctgctgagcttctgtctcgacattgacgcggaaaataacccgcaacatccacatggtgaacaaaatcccgcaaatgccgaatggatacgccatcgcgtaactcatccccatctgatcgaccatttccattggtgtacccaggtcgcgcaaaatctgctgccctgcccccagcgctggcgtattggtaaccgcaccggagaaaatccccagcactaccggcagtggaatatcaaacagtttatgcaggatggcggtaaccagaccaccgatgatgacgatcagaacagcaaacaggttgaggcgtaatccggagacgcgcaaactggcaaagaagcccggccctacctgaatcccgatagtataaacgaacaggatcaggccaaattcctgaataacatgcagcatatcgctacttaatgtcatccccgcctgagaaacaaaatggccgacgatgatcccaccaaacagcacgccgccaatacctaatcctatgccgcgaaatttgacgttgccgataaacaaaccgacgactgccaccaaagccagaatactgaccgttaatgctatatcactcatcgtccatttctcttgagataacattttaattgctacggattatggctgaatcggtgaagcagatttgccttatagcgcacattatcacgggaaagaacgtgccgaaatatcttaaacagtcgaaatttaacgcattgttgagtaagtaagacaaaaaaagccccaccagaatggcggggcaaagagaatagctagttagctatttaacgcgggacgttcgctgatagcgatacgctgcgctgcgatgggttcaggctcattacgaattaaatcaatatgcagtaaaccgtttacgaaggttgcgccagagacttccatattttcagccagcgtaaagctcaggctaaatggctgattcataagcccttgatgcagccattttttctcttcttttggctgctccggcgtgccttttacgctcaggcgcgtaccttccagttgaatctctaaatcttcctgacggaaacctgccagcgcaagggtaatgcggtagtggttatcgtcgcttttctcaatgttgtacggcgggaagctctggctttcaccggcgttttgcagtgcgttggccagtttgtcaaaaccgatccattgacgcatcagtggggataaatcgaagttacgcatagtcatttctccttctaagaagcgagtaagtacctgcaaatccgaagattcgcatatgctccctgacggcgagcatggagatgtcaggccgcgccaggcggccttagggaattagttgatttcgatacggcgcggttttttcgcttccggaatcacgcgttcgagatcgatatacagcaaaccatttaccaggttagcaccacgaacatgaatgttctcagctaactggaatttgcgttcaaagttgcgttcagcgatgccctggtacagataggtgcgctctttttgttcgtcggcgtgagcacctttcaccaccagcagattatcctgggcggtaatttccagttcgctctcagcaaaaccagccacagcgatagcaatgcggtaatggttttcgtctaccagttcaacgttatacggagggtagccgccattactctggctctggttgttttctaagtggttaaacaaacggtcaaatccaatagcagaacggtaaagcggggataaatcaaagttacgcataatcaatagctcctgaaatcagcgagaatgtaagaccttccacaatggacaggtcaggtagccagaacacccatcaggcgcgtcctcatcggctacgatgtaaaaatgggtctggaaatgaacttttcaagccttatcagcggacttttttttgcagtttatggtctattgcatagactgagggggcagcacgaaacgttaaagtgcgatagccgccacagtgcgacgtaatgatgatgttattttcagcaagggatcgctataactcatcaggccaacacccacgatcaacagatgaatttattatgataagaaatgtgttgttagcgttcatgatatgcagcggaatgacattactcggaggatgctccagcgtgatgtcccataccggagggaaagaaggaacgtatcccggcacccgcgccagcgcaaccatgattggcgacgatgaaaccaactggggcactaagagcctggcgattctcgatatgccgtttaccgctgtgatggacacgcttttactgccgtgggatgtgttccgcaaagacagcagcgtgcgcagccgcgttgaaaaaagcgaagccaacgcgcaagccaccaatgcggttattccaccggccagaatgcctgataactgatttagcgatcagtttcggtgatccacagctggccgccttccatccacgccagccactgaccatccgggctgaagaccacggcgtccgcagaaggactattggcgtggtgttcggttaaatactcaacctcgccgctttgcgcatgggcacaagcaattcgattatccagcacaaagcccaaccattctccactcggatgccagttaaatgcagactgaatatccgttttgttatgggttaactggcgcggctcgccgccctgtgggctgataagccacagttgcacaatgccgttatcatctcgcattaaaaacgcgatttgtgtaccctgcggattacagcgcacccagtggcgcgggacgttgactaaccccggataagcccgatggtgggtaaaggttaaacgtcgctgcacgacgccacgcggtggcgcgggcagggttgtttccgttccgcttaacggcgcatcacctgccgctttccagccagcttcatcttgcggtaactcaacgataaacagctccggcactttctcgccctttgggctaagtgtgtcgccaataaatgccagcgcgtgatttcctacccatccttcttcataagcacgattgatttcatcactgccaggctgtggcgtgggcgtggttttgctcaccagcacgcaccagtggctaccgctgtattcacgcggatgctgcttttgtacgttgaccgggccaaacggcgcagcaacaccgacgtttcgcaaatccagcgccggatcgagttcatgcattacatggtcgttataggtaaagctcaccctttcaccgttcgggctaaagacatgcacatggctgccgccgcgcagcactcctggcgtatacggcgcggtaatatccatcgcatcaaggttactcatcttgccgccttcaacaatcactccgcgccgatgatggaagtcgtaatgccatgtttcatcaggattttccgggccgtggatgaaaacatatttctcactcttcggatgaacggtcaccacgccgacgtgtgcgccctgactcgcgcgatagataacctcgacctcgccggtatggatattcacacgctcaatggtctcgccggtaaagctcgcgccagaaggacgcacgtcaaataccagccactggctgtcgggcgtccaggtattggtattggtgagcaggtgattacggggagcaaaggttatctgtttcatggcgcggtcctgatacaaaacgggtcccgccatcatacttcacaaggacttcactttcagacaatagtcttttgccatcgtgatgaatgtgagtgaaaagatggaacatttcgacgtggcgattattggcctcggcccggcaggaagcgcgttggcacgaaagttagcaggcaaaatgcaggtgatcgcgctggataaaaagcaccagtgtggtactgaaggtttcagcaaaccctgcggcggtctgctggcaccggacgcgcagcgatcttttattcgcgatgggctgacgcttcctgtcgatgtgatcgctaatccgcagattttcagcgtcaaaaccgtcgacgtcgccgcaagcctcacgcgtaactaccagcgaagctatatcaatattaatcgccatgctttcgacttgtggatgaaaagcctgatccccgccagcgttgaggtttatcacgacagcctgtgccgaaaaatctggcgtgaggatgataaatggcatgtcatttttcgtgcagacggctgggagcaacatattaccgcccgctatctggtcggtgccgatggcgcaaacagcatggtgcggcgacatctctacccggatcatcaaatccgtaaatatgtcgctatccagcagtggttcgcggagaaacatccggtgccgttctactcctgcatctttgataatagcataactaactgttatagttggagtatcagcaaagacggttattttatctttggcggtgcctatccaatgaaagacggtcagacgcgtttcacgacgctgaaagagaaaatgagcgcctttcagttccagtttggtaagacggtgaaaagcgaaaaatgcacggtgctgtttcccagccgctggcaggattttgtctgcggtaaggacaacgcctttctgattggtgaagcggcgggatttatcagcgccagcagcctggaggggattagctatgcgctggatagcacagacattctgcgtagcgtgttactgaagcagccagagaagctcaataccgcttactggcgcgccacccgcaaactgcgtttaaaactcttcggcaagatagtaaaaagccgatgcctgaccgcaccggctttaagaaagtggattatgcgcagtggtgtggcacatattccacagttgaaggattaaccaacgcgcttcacatcgcccaccagcaggatataagagagcgcgccaatcaacgcgacggcggagatataaaccagtgcaggtgcgaaaccgtaaccctgcgccaggtaccccaccaccagcggaacggtgatgccgcccagaccaccggcgaagttaaacacgccgccggttaaaccaatcaggcgcatcggtgccagagaagaaaccaggctccaggtaatgctagcaaaaccgttaccgaagaatgccagcgccatcaggcacataatcatcatcggatcgttagtgtagttagcgcccataatgcaggtggagatcagcaagccgcagataatcggcgttttacgcgcaaagcccagactaaagcccttacgtaccagcagatccgctacccagccagagagcaggacgccgacaaacgccgcgaggaatggcaccgtggtcataaagcctgctttcagcgccgtgattcctttttcctgggttaaatagttcgggaaccaggttaagaaaaaccacagtgtagaagccaccgcaaattgcccaagataaacgccgatcagtttacgatggaacaccagtttccagtctttggctgttaacggctgacgcgcctctttcttcaccggcgcatcaccatccaccagaccgccgccatcacgaatgtaatccagttcagctttgctgatacctttggtcaggcgcggcggctgataaaccttaaaccaaatcaggctccagataatgccgataccaccagtgacaatgaacacccagtgccagctcaacatctcctgaatccagatcagcagcggcgtcagaaacgccagaccgacaaactgaccagacgtataaaaaccaacggcagaagcgcgttcatgttccgggaaccagctggtcaccatccggttattggtcgggaaagcaggcgcttcgaaaataccggttatcgcgcgcagaccaattaaactcattaagcccgtggcaaagccctggaataaagtcgccacactccagccaaatatcgcaataaaataagtcacgcgagaacctacgcgatctaaaaaccaaccgccggggatctgacatagcgtataaagccaggcgaaggcgctaaatacatagcccatttccgctttggtaatgccgaactcttcctgaatatgggcggaagccacggccaggttggcgcggtcgacataacaaatgactaccgtaataaagatcatcaccagcgtcagataacgccgacgccccggctttgctgcattaacgggaatatccatagcgagctttctccagattttgggcatagcgaagccgctcaccatgccctgtaatttacagagggttatatttttgtattgctgttttagtgcccgatgaggggcttacgtggcaggaattaccactctgctacgctgttatcttcatgacgccagagcggattacgccagtccggggcatttttactgaactcaatcactttagcttcgtcgatttccacgcctaagcccggtttcgttaacggtttaaagaagccgccgaccatgctgaagtcttctttgtttttcacaaagtcgagtaactccgcgcctttgttgtaatgaattcccatactttgttcctgaagtacggcgttataggaaacaaagtcgatatgcaggcaagccgccagtgcaatcggtccgagcggacagtgcggcgcaagggtcacgtcataggcttctgccattccggcgattttgtagcattcggtaataccgcccgcgtgggagagatccggttgcagaatgctaataccacctgcctccagcacgcgtttaaaatcgaagcgactgaacatgcgttcacccgccgccagtggaatatgcgtttgtgccgccagtttcgggtagtattcggcttgttccgccagcaccggctcctcaataaacagcgggcgatacggctccagttctttaatcagcactttcgccatcggcgcgctgacgcgaccgtggaaatcaagaccaaactcaatctgattgccaaaagcttcacgaatttgtgccacggtgttaaccgccgcatctaccgcgcgggagttatcaattagccccagttcttcacaaccgttcagtttgaaggtatcgaagccgatttcgcgtagcgttttaatgccgtcgataacatccgccggacgatcgccgccaacccaactgtaggctttaattttgtcgcgaaccaggccgcccatcagttgccagaccggcgcattcagcactttacctttgatatcccataacgcctggtcaatcccggcgatggcgctcatcaggatcggaccgccgcgatagaatccggcgcgatacatcacttgccataagtcattgatgcggcttggatcctgaccaatcaaatagtcacccagctcgtgaactgccgcttccaccgtacgggcgcggccttcgatcacgggctcgccccaaccgaccacgccttcatcggtttcaattttcaggaacatccagcggggaggtaaacgatacgtggtaattttggtgattttcattgcactgcctctcgatacgccttaacaaatgctgctgcctgctgcgcggtgcgctctacggattgcccggcgcgatagagatcgctgcctaagcccgcccctgcacaacctgcgtctatccactgcgccaggttttctggcgtcacgccgccaacggcaaagactgcgatgtcgcttggcaataccgcttttaacgctttgatgtattgcggaccaaaagcgctactcggaaatattttcagcgcctgcgcgcccgcttcgagcgcggtaaaggcttcggtcgccgtcgcgcagccggggcagacggtcatgccgtagcccaccgcacggcggatcacttcactatggatattgggcgtaacgatgagctgacagcccatcctggcgagcgcatcgacctgttcaggtttcagtaccgtacctgcgccaatcaacgccttgtcgccgtacgcatcaacgatggcgggaatgctttgctcccattgtggggaattcagcgggatttcaaccgcgtcgaacccggcgtcaatcaccgcgccaacatgcgccagcgcctcgtcgggcgtaataccgcgcaaaatggcgatcagcgggagtttagtttgccactgcatgagcgatgctccttataccagcctgaaatgccgtgtcgcccgccaccgccgtcacgtcgcaacccatcgcctgaaaggcttgctggtagcgcgcggtcaggcttgttccggcgacaagggtgatggcgtgttgatgggccacatagtcgcgcatactggcgacctctgcgccaatcaacaaaccagagagaaattcgctgacctgttcgcggggaagtgttcccagcacatggctggcgcgaacttcaaaaagctgcggcaatatggcgggcgtattaagaccacgctcaaggccagctgtgaaggcatcggcagagttttcctgcggcggcaaacctgcgccaatcaaactgtgatttaacagtaaatgatgtaattcaccggtcatcacggtgcgaaaatcgttgatttgctggctatcggcctgcacccatttgcaatgggttccgggcatgacataaagagaggaaggagccagagctcgcgcgccgatcaattgtgtttcttcgccgcgcatcacattgtggttatcgtcatgagagacacataatccgggaataatccagatattgtcgccaacactcgttaattgttcgccaatagagctaaaacaggcaggaacagataaatacggtgcaactttccagccgacgttgctgccaaccattcctgccattaccactggcgttttctcttcacgccagtcggtcgtgacttctgctaacaccgcagccggagattttccgttcaggcgcgtgacgcctgcttcactttgcctgctctccaggcagtggtcgccctgataaagccaggcgcgcagattggtgcttccccagtcaattgcgatgtagcgagctgtcatgtgatttcctttaaccttcgtgtgctgctggcgatcatggtaagcgccgcctgctctgccgcatcgccgtcctgatgtcgtatcgcatcgaacagcgccttatgttcctggagcgtttgcggcatgttggcctcatcgcccatccaggttcgttcaaaaaccgcccgctgcaggctactgatcgcaatgctaagttgctgtaacaccgggttatgcacgctctgcagcaccgcctcgtggtagcgaatatccgcttcgttaaacgcttcgcggtcctgattgttggcaatcatctcgttcagcgcgctttcaatctgcgccagatcgctggaagtcgcgcgctctgctgcccaacgggcaatcgccggttccaccagatttcgcacttcgctcatggcactgataagccgtgggtcgtagtcattttccagcacccattgcagtacgtcagtgtcgaggtaattccactggttacgcggtgccacaaacgccccgcgataacgtttcatttcaatcagccgcttcgccatcaggctacggaacacctcacggatgatgttgcggctggttgcaaactcctcacagagttccgcctcagccggaagcgggctgcctggcacgtatttgccgtgaacgatctgtttacccagcgtaatgacaatgcgatcggttttattgagagtcatggagagtccttgtgctctgtatgttcttctctactttaccccgatcgatgcataacgcggcaactttgtagtaccagcgtgatgacgttcgcgtttgccgtgcgtgtaatgtagtacaaacttatattgttgtactacaatttagatcacaaaaagaacaatgcataaaaaaatgacatgcgtcgggcagaaatctgaaaagggatatcaggcgctaaacaggagggaaagaagagtatgctttcaacggcttagctactcgtttaaaggattaatcatgaagttgaattttaagggattttttaaggctgccggtttattcccactggcgctgatgcttagtggctgtatcagctatgctctggtttcccataccgcaaagggtagtagtggaaagtatcaaagccagagtgacaccatcactgggctaagccaggcaaaagatagtaatggaacaaaaggctatgtttttgtaggggaaagcctggattaccttatcactgatggtgccgatgacatcgttaagatgctcaatgatccagcacttaaccggcacaatattcaggttgccgatgacgcaagatttgttttaaatgcggggaaaaagaaatttaccggcacaataagcctttactactactggaataacgaagaagaaaaggcactggcaacgcattatggttttgcctgtggtgttcaacactgtaccaggagtctggaaaacctaaaaggcacaatccatgagaaaaataaaaacatggattacagtaaggtgatggcgttctaccatccatttaaagtgcgattttatgaatactatagtcccagaggcattccggatggtgtttccgcagcattactgccagtgactgttacgctggacatcattactgcaccgctgcaatttctggttgtatatgcagtaaaccaataatcagtaagcgggcaaacgcgtttatgctgtttgcccgcccacagattaattcagcacatacttctcaatagcaaacgccacgccatcttcaaggttagatttggtgacaaagttcgccacttctttcacactaggaatagcgttatccatcgccacaccgacgcctgcatattcaatcattgcgatatcgttttcctgatcgccaatcgccatgatttcttccggtttaatacctaacacgtcggccagacttttcacccccgtacctttgttaacgcgtttatcgaggatttcgaggaagtacggcgcacttttcagcacggtatatttctctttcacttcctgcggaatacgcgcgatagcctggtcgaggatggcgggttcatcaatcatcatcactttcaggaactgggtattggggtccattttctccgcttcgcagaacaccagcggaatggtggcaacgaaggattcatgcaccgtgtagtagctgatatcacggttggcggtgtacagcgtggtgcggtccagggcgtggaaatgagaaccgacttcgcgagagagtttttccaggaaacgatagtcgtcatagctgagagcagtttgcgccacggtgctaccatcagcggccttctgtaccagcgcgccgttataagtaatgcagtagtcgcccggctgttccatatgcagctctttcaggtagttgtgcacacctgcatacgggcgacccgtcgttagcacgacattcacgccacgggcgcgagctgcggcaatcgcatttttaacggcgggactaatggtgtgatcgggcagcagaagggtgccatccatatcgatagcaatgagtttaatagccatgagttccccaggtagattggttcctgacccatgctaacgcgattccgctcaaaaatcagtacaacacccgagggaaaagggggatgcaacgcgcgttgcgtgctccctttttgcttagcggaagagtttccctttcagcagttccatgcctgcggaaagcagatcgttattggcttgtggactcacttcaccttgcggactgagcgcatcaataatcttcggcaattgttctgccagtaaactggaagctgtactggtatccacgccaagtttttgcccgagatcggacaccgcatttgtgccgagcgcgctttccagttgctcgccactaacgctttgattgccctgttgattactcagccaggtactgagaatggcccctaagccgccactttgcagtttttccagcagcacctgaatgccgccctgctcctcaacccaacttaaaatagcctgatatttccccgcatcgcctttcagaaaggcaccgacaacttcatcaaaaagccccatgataatcacctgtaaagcgttacgtgttgacccaaaaagtatagatttgcgggatgataattgcggattgcagaaataaaaagggcggagatgatctccgcccttttcttatagcttcttgccggatgcggcgtgaacgccttatccggcctacaaaatcatgaaaattcaatacattgcaagattttcgtaggcctgataagcgtagcgcatcaggcacgctcgcatggttagcgccattaaatatcgatattcgccgctttcagggcgttctcttcaataaacgcacggcgcggttcaacggcgtcgcccatcagcgtggtgaacaactggtcggcagcaatcgcatctttaacggtaacgcgcagcatacgacgactttccgggtccatagtggtttcccacagctgttccgggttcatctcgcccagacctttataacgctggatggagaggccgcgacgggactctttcaccagccagtccagcgcctgctcgaagctggctaccggctgacgacgctcgccacgttcgataaacgcatcttcttccagcaagccacgcagtttctcacccagcgtgcagatacgacgatattcgccaccggtgataaactcgtgatccagcggatagtcagtatccacaccgtgggtacgcacgcgaacaatcggctcgaacaggttttgctcagcattggtgtgaacatcaaacttccactggctgccgtgctgttctttgtcgttcagttcgctgaccagcgcgttcacccagcgggtaacggtctgctcatcagaaaggtcagcttccgtcaacgtcggctgatagataagctctttcagcattgctttcggataacgacgctccatacgattgatcattttctgcgtcgcgttgtactcagataccagtttctctaacgcttcgccagccaatgccggtgcactggcgttggtgtgcagcgttgcgccgtccagcgcgatagagatctggtactgatccatcgcttcgtcgtctttaatgtactgttcctgcttgcctttcttcactttgtacagcggcggctgagcgatgtagacgtgaccgcgttcaacgatttccggcatctgacgatagaagaaggtcaacagcagcgtacgaatgtggctgccgtcgacgtccgcatcggtcatgatgatgatgctgtgataacgcagtttgtccgggttgtactcgtcacgaccgataccacagccaagcgcggtgataagcgtcgccacttcctgagaagagagcatcttatcgaagcgcgctttctcgacgttgaggattttacccttcagcggcagaatcgcctggttcttgcggttacgcccctgcttcgcagagccgcccgcggagtccccttccaccaggtacagttcggaaagcgccggatcgcgttcctggcagtctgccagtttgcccggcaggcccgctaagtcgagcgcacctttacggcgggtcatttcacgcgcgcgacgcgccgcttcacgggcacgggcagcatcgataattttgccaaccacgattttcgcgtcggttgggttttccagcaggtattctgccagcagttcgttcatctgctgttcaaccgcgcttttcacctcagaagaaaccagtttgtctttggtctgggaggagaatttcgggtccggcactttcacggaaacgaccgcaatcaggccttcacgcgcatcgtcaccggtggcgctgactttggcttttttgctgtagccttctttgtccatgtaggcgttcagggtacgggtcatcgccgcacggaagcctgccaggtgagtaccgccgtcacgctgcggaatgttgttggtaaagcagtagatgttttcctggaagccatcgttccactgcaacgccacttcgacgccaataccgtctttttcagtggagaagtagaagatattcgggtggatcggcgttttgttcttgttcagatattcaacgaacgccttgatgccgccttcatagtggaagtggtcttctttgccgtcgcgcttgtcgcgcagacgaatggaaacgccggagttgaggaagctcaactcacgcagacgtttcgccagaatttcatattcgaactcggtcacattggtgaaggtttcgaggctgggccagaaacgcaccatggtgccggttttttcagtctcgccggtaaccgccagcggggcctgcggtacaccgtgttcgtagatctgacggtgaattttaccctcgcgctggataaccagctccagtttttggctcagggcgtttactacgctaacaccaacgccgtgcagaccgccggacactttataggagttatcgtcaaatttaccgcctgcgtgcagaacggtcatgatcacttccgccgcgcttacgccctcttccgggtgaataccggtcggaatgccgcgcccgtcatcctgtacagagacagagttatcggcgtgaatggtgacgataatttctttacagtgacccgcgagcgcttcgtcgatagcgttatctaccacctcgaataccatgtggtgcagaccggtgccgtcatccgtgtcgccgatatacatacccgggcgcttacgcaccgcatccagccctttcaggactttgatactggaggagtcataagaattgctcatcaacgtttctcgctcatttatacttgggttaatccgttattttacccttttccacggtaaacatcttgctattttcgtcgctcatgtctataacgtgttcagcactgatcgcgctgacaaagacctgactttgcgtcgcttttaagcggctggcaagcagcccgcgacgctcatcatcaagctcagaggcaaaatcatctatcaggtagagacaccgccgcccgctttcacgggtgaggaactctccttgcgccagacgtaaggcgcacatcaacagcttaagctgcccacggcttaaggtatcttccaccggcgcaccgtcggcgcgaatgcgtaagtccgctttgtgcgggccgtgcgcggtgtaggttagctggcgatcgcgttcaaaattacgttccagcacctcagcatattctgtctctttctcccagccgcgctggaaagagaaagtcagagaaaactcagggagaaattgcttacaggtatcagccatatcggccgcgataccggcgctatactccgcgcgccaggtgctgatttgctccgccagcgggatcagctctttatcccacgggcgtagctgttcgtaacgtgtcacctggcgcagcgccgcattgcgctgcttgagcaatcgcttgagattgctccaggcggtgaaaaatccgggttcgttgtgaaagcatccccagtcgaggaatgctcttctgtatttggggccgccgttgagtaaagtaaacccttctggcgttatcaactgcattggcatcaggtgcgccagttccgcgaccttatgcccgtctgtaccgtcgatgcggactttgctgtcgccctgtttgtctttggttaagccaatcgctgtctcgcgctcttcgccctgtaatcgcccgtggagaacaaacgcctcctgctcatggcgaatgacgcgaccaatctgcaaactgcgaaacgcccgaccatggccgagcgtatagatggcttccagcacgctggttttgccactgccgttggcacctaccagaaagttaaagccgggagataaggcgagatccgcggtttcaatgttgcggaaatcgcggatcaacaagcgggtgagggacattacagtctcattggcatgacaacataagccgcgctctggctggccgcatcttcaatctgcacgctggaaacgctatcggtcagcatcatgcggacgttttcgcatttcagcgcgttcagaacatccagcacataactgacgttgaagccgatttccatctccgcaccgctataggtaacgtcgaggatctcttccgcttcttcctgttccgggttgttggcggtgattttcagctggttttcgctgacataaagacgtacgccgcggaatttctcgttagagagaatcgccgcgcgagcaaacgcctgcttgagcagatcgcagccagcttccagatgtttgtccgggttcttcggcagaacgcggcgataatccgggaagcgaccatccaccagtttggaggtgaagataaagtcgccaacgtgggcgcgaatgttgttgctgccaatctgtacgcgcagcggattgtcgccgccgtcgagcatacgcatcagttcaatcacgcctttacgcggtacgatcacgctatggcttggcaaagattgaccaattggcatactacagaccgccagacggtggccgtcggttgccacggtgcgcagttcttcaccttcggtttcaaacagcataccatttaagtaatagcgaacgtcctgatgcgccatagaaaactgggtcgcttcaatcagacgcttcatcgttgcctgcggcagggtaaattcgacttcactctgccagtcatcgaggttcgggaaatccgccgctggcagggtagacaggctaaaacggctacgcccggagcgtaccagcatccgttcaccttccagctgcacggcaatttccgcgccttcaggcagaccacggcagatatcaaagaatttgcgcgccggaacggtcgtcgctcctggctcgtgtggctgaaccagcgcaacacgtgccaccatttccatctcgagatcagtaccggtcaggctcaacgtaccgtcagcaacctgtaacagcagattaccgagaatcggtagcgtaggacgaccacctaacggaccgctcacctgttgtagcggttttaataaatgctcacgttctacggtaaatttcataggtttagctactcaatgttctgattaaattactaaaatcttctttgatatcgtggctctcttcacgcaactgctcgatcttacggcaggcatgaagcaccgtcgtgtggtcacggccaccaaacgcatcgccaatctccggcagactgtggttagtcagctctttcgccagcgccatcgccatctggcgcggacgcgccacgctgcgggatcgacgcttggaaaggagatccgcgactttgatcttgtagtactccgccaccgtcttctgaatattgtcgatggtgaccagtttttcctgcaatgccagcaagtcgcgcagcgcctcacgcacgaagtcgatggtgatcgcccgtccggtaaagttggcattggcaatgacgcggttcagcgccccttccagctcacgtacgttagatcgtagacgcttggcgataaagaacgccacttcgcccggcaaacgaatgtcgttttcgtcggcctttttcatcaggatcgccacacgggtttccagctctggcggttcgatcgccacagtcagtccccaaccgaagcgggatttcaaacgatcctcaacgccgttgatctctttcggatagcgatcgctggtgagaatgatctgttgattaccttccagcagggcgttgaaggtgtggaaaaactcttcctgagatcgttctttattagcaaaaaactgaatatcgtcgatcagcagtgcatctacggaacggtagtagcgtttaaactcttcgatcgcgttgttttgcagggctttaaccatgtcctgaacaaagcgctcggagtgcatataaaccactttggcattcggcttgcgcgccataatgccgttacccaccgcatgcagcaggtgagttttacccagacccgtgccgccataaaggaacaacgggttataggcaccgccagggttatccgccacctggcgagccgccgcgcgcgccagttggttagatttaccttcaacgaagttatcaaacgtgtgtttgacgtttacgttagaacgataggtcggttctgccggggccgggacgttatcccaaccactgcgcgtagaaggcgcagcacgttgcggctgcgtttgcgccacctgtgcaggggccgcgacgttgctcgtcactgccgcttgtggcgtttgcgtcaccggtttggtgccgacttcaaaacgcagctgtggggcatccgctccgcagaaactggttagcagtccattgatattattaaggtacttgtcccgtacccaatcgaggacaaaacggtttggcgcgtacagggccagcgtgttatcgctcagttccgcctgcaatgggcgtatccacatactgaattctgtggctggtaactcatcctgcaatcgggcaagacactgctgccaaaggctaagactcacggcggactccactcgaacaaaagtcgataatgactaaggctgaaacattcatgattgttgacgtacgtcgaaaagaccctgcttgagggtgacgcacgaaccgctgtctgcggttatatgcccgatcaagatcctgcaaaacgatcgggaccgcggatcatagcctaaactgcgcaagagatcttctgtttctcacagattttcccgatttatccacaggactttccagaactcgctaagtgtaaacgatcctgccgcgaggcgggcacgatttacgccgcatattggaaaatttaatgaccatagacaaaaattggcttaatcgatctaataaagatccaggacgatccttgcgctttacccatcagcccgtataatcctccacccggcgcgccatgctggtttccactggtgtgaggtcgtacattttccctgcgaaaaggtgcggaaaagcgcggtaaataaggaaagagaattgactccggagtgtacaattattacaatccggcctctttaatcacccatggcttcggtgtccatcgtttcatttttcggcggatatccaataaagccattgaatttattcaagtttaggtagaaatcgccatgaaacgcacttttcaaccgtctgtactgaagcgcaaccgttctcacggcttccgtgctcgtatggctactaaaaatggtcgtcaggttctggcacgtcgtcgtgctaaaggccgcgctcgtctgaccgtttctaagtaataaagctaacccctgagtggttaagctcgcatttcccagggagttacgcttgttaactcccagtcaattcacattcgtcttccagcagccacaacgggctggcacgccgcaaattaccattctcggccgcctgaatagcctggggcatccccgtatcggtcttacagtcgccaagaaaaacgttcgacgcgcccatgaacgcaatcggattaaacgtctgacgcgtgaaagcttccgtctgcgccaacatgaactcccggctatggatttcgtggtggtggcgaaaaaaggggttgccgacctcgataaccgtgctctcagcgaagcgttggaaaaattatggcgccgccactgtcgcctggctcgcgggtcctgacttaatcggaagcgttggaaaaattatggcgccgccactgagccctggcagccgggtcctgatagccctcattcgggtctatcaacgcctgattagtccgctactcgggccgcattgtcgtttcactccaacctgtagtagctacggaattgaggcattgcgcaggtttggagtgataaaaggcagttggttgacggtgaaacgcgtattaaaatgccaccctttacaccctggtggtgacgatcccgtcccgcccggaccatttgataccagagaacactaacgatggatagccaacgcaatcttttagtcatcgctttgctgttcgtgtctttcatgatctggcaagcctgggagcaggataaaaacccgcaacctcaggcccaacagaccacgcagacaacgaccaccgcagcgggtagcgccgccgaccagggcgtaccggccagtggccaggggaaactgatcagcgttaagaccgacgtgcttgatctgaccatcaacacccgtggtggtgatgttgagcaagctctgctgcctgcttacccgaaagagctgaactctacccagccgttccagctgttggaaactagtccgcagtttatttatcaggcacagagcggtctgaccggtcgtgatggcccggataacccggctaacggcccgcgtccgctgtataacgttgaaaaagacgcttatgtgctggctgaaggtcaaaacgaactgcaggtgccgatgacgtataccgacgcggcaggcaacacgtttaccaaaacgtttgtcctgaaacgtggtgattacgctgtcaacgtcaactacaacgtgcagaacgctggcgagaaaccgctggaaatctccagctttggtcagttgaagcaatccatcactctgccaccgcatctcgataccggaagcagcaacttcgcactgcacaccttccgtggcgcggcgtactccacgcctgacgagaagtatgagaaatacaagttcgataccattgccgataacgaaaacctgaacatctctagcaaaggtggttgggtggcgatgctgcaacagtatttcgcgacggcgtggatcccgcataacgacggtaccaacaacttctataccgctaatctgggtaacggcatcgccgctatcggctataaatctcagccggtactggttcagcctggtcagactggcgcgatgaacagcaccctgtgggttggcccggaaatccaggacaaaatggcagctgttgctccgcacctggatctgaccgttgattacggttggttgtggttcatctctcagccgctgttcaaactgctgaaatggatccatagctttgtgggtaactggggcttctccattatcatcatcacctttatcgttcgtggcatcatgtacccgctgaccaaagcgcagtacacctccatggcgaagatgcgtatgttgcagccgaagattcaggcaatgcgtgagcgtctgggcgatgacaaacagcgtatcagccaggaaatgatggcgctgtacaaagctgagaaggttaacccgctgggcggctgcttcccgctgctgatccagatgccaatcttcctggcgttgtactacatgctgatgggttccgttgaactgcgtcaggcaccgtttgcactgtggatccacgacctgagcgcacaggacccgtactacatcctgccgatcctgatgggcgtaacgatgttcttcattcagaagatgagcccgaccacagtgaccgacccgatgcagcagaagatcatgacctttatgccggtcatcttcaccgtgttcttcctgtggttcccgagtggtctggtgctgtactatatcgtcagcaacctggtaaccattattcagcagcagctgatttaccgtggtctggaaaaacgtggcctgcatagccgcgagaagaaaaaatcctgattcggtgagttttcgctaaaataagggcggtcagttgaccgccttttttcttttcgtagggcggataagcaccgcgcatccgccacacaaagcaacaggaacatcatgagcgataatgacactatcgtagcccaggccacgcctccgggacgtggcggcgttggcatcctgcgcatctccggcttcaaagcccgtgaagttgccgaaaccgtgctgggtaaactgcctaagccgcgctacgccgattatcttccgtttaaagacgccgacggcagcgtgctcgatcaggggattgcgctatggttccctggcccgaacagcttcaccggcgaagatgtgctggaactgcaaggtcatggcggtccggtgatcctcgacctgctgttaaaacgcattctgaccattcccggcctgcggattgctcgccctggtgagttttccgaacgcgcgtttcttaacgataaacttgacttagcccaggccgaggcgattgccgatcttatcgacgccagtagcgaacaggcggcccgtagcgcacttaacagcctgcaaggcgcattctccgcacgggttaatcatctggtagaagccctcacccacttgcgcatttacgtcgaagcggcaattgatttccccgatgaagagatcgatttcctctccgacggaaaaattgaagcccagctcaatgacgttattgccgatcttgatgcagtgcgtgctgaagcacgtcagggtagtttgttgcgcgaagggatgaaagtggtgattgccggacgtcctaacgccggtaaaagcagcctgttaaacgcgctggcggggcgtgaagcggcaatcgtaaccgatatcgccggaactacgcgtgacgtgctgcgtgagcatatccacattgacggaatgccgctgcatatcatcgataccgccgggctacgtgaagccagtgacgaagtagaacgtattggtatcgagcgcgcgtggcaggaaattgaacaggccgaccgcgtgctgtttatggtcgatggcaccacaacagacgccgtggatccggcagagatctggccggaatttattgcccgtctgccagcgaaactgccgatcaccgtggtgcgcaataaagccgatatcaccggcgaaacgctgggaatgagtgaagtgaacggtcacgcgttaattcgtctcagcgcaaggactggtgaaggcgtggacgtgctgcgtaaccatctcaaacagagcatgggctttgacaccaacatggaaggcggcttcctggcgcgtcgtcgccacctacaggcgctggaacaggcagcggaacatctacaacagggcaaagcgcaactgttgggagcctgggcaggtgaactgctggcggaagagttgcgtctggcacagcagaacttaagcgaaatcaccggggaatttactagtgacgacctgctggggcggattttctccagcttctgtattggtaagtaaccgcgcttacgaggccgcattctgactgtcagatgcggcttcgcttcattgttaccactcctgttattcctcaaccctttttttaaacattaaaattcttacgtaatttataatctttaaaaaaagcatttaatattgctccccgaacgattgtgattcgattcacatttaaacaatttcagaatagacaaaaactctgagtgtaataatgtagcctcgtgtcttgcgaggataagtgcattatgaatatcttacatatatgtgtgaccagtaaatggttcaatattgacaacaaaattgtcgatcaccgcccttgatttgcccttctgtagccatcaccagagccaaaccgattagattcaatgtgatctatttgtttgctatatcttaattttgccttttgcaaaggtcatctctcgtttatttacttgttttagtaaatgatggtgcttgcatatatatctggcgaattaatcggtatagcagatgtaatattcacagggatcactgtaattaaaataaatgaaggattatgtaatggaaaactttaaacatctccctgaaccgttccgcattcgtgttattgagccagtaaaacgtaccactcgcgcttatcgtgaagaggcaattattaaatccggtatgaacccgttcctgctggatagcgaagatgtttttatcgatttactgaccgacagcggcaccggggcggtgacgcagagcatgcaggctgcgatgatgcgcggcgacgaagcctacagcggcagtcgtagctactatgcgttagccgagagtgtgaaaaatatctttggttatcaatacaccattccgactcaccagggccgtggcgcagagcaaatctatattccggtactgattaaaaaacgcgagcaggaaaaaggcctggatcgcagcaaaatggtggcgttctctaactatttctttgataccacgcagggccatagccagatcaacggctgtaccgtgcgtaacgtctatatcaaagaagccttcgatacgggcgtgcgttacgactttaaaggcaactttgaccttgagggattagaacgcggtattgaagaagttggtccgaataacgtgccgtatatcgttgcaaccatcaccagtaactctgcaggtggtcagccggttagtctggcaaacttaaaagcgatgtacagcatcgcgaagaaatacgatattccggtggtaatggactccgcgcgctttgctgaaaacgcctatttcatcaagcagcgtgaagcagaatacaaagactggaccatcgagcagatcacccgcgaaacctacaaatatgccgatatgctggcgatgtccgccaagaaagatgcgatggtgccgatgggcggcctgctgtgcatgaaagacgacagcttctttgatgtgtacaccgagtgcagaaccctttgcgtggtgcaggaaggcttcccgacatatggcggcctggaaggcggcgcgatggagcgtctggcggtaggtctgtatgacggcatgaatctcgactggctggcttatcgtatcgcgcaggtacagtatctggtcgatggtctggaagagattggcgttgtctgccagcaggcgggcggtcacgcggcattcgttgatgccggtaaactgttgccgcatatcccggcagaccagttcccggcacaggcgctggcctgcgagctgtataaagtcgccggtatccgtgcggtagaaattggctctttcctgttaggccgcgatccgaaaaccggtaaacaactgccatgcccggctgaactgctgcgtttaaccattccgcgcgcaacatatactcaaacacatatggacttcattattgaagcctttaaacatgtgaaagagaacgcggcgaatattaaaggattaacctttacgtacgaaccgaaagtattgcgtcacttcaccgcaaaacttaaagaagtttaattaatactacagagtggctataaggatgttagccactctcttaccctacatcctcaataacaaaaatagccttcctctaaaggtggcatcatgactgatcaagctgaaaaaaagcactctgcattttggggtgttatggttatagcaggtacagtaattggtggaggtatgtttgctttacctgttgatcttgccggtgcctggtttttctggggtgcctttatccttatcattgcctggtttagtatgcttcattccgggttattgttattagaagcaaatttaaattatcccgtcggctccagttttaacaccatcaccaaagatttaatcggtaacacctggaacattatcagcggtattaccgttgccttcgttctctatatcctcacttatgcctatatctctgctaatggtgcgatcattagtgaaacgataagtatgaatttgggttatcacgctaatccacgtattgtcgggatctgcacagccattttcgttgccagcgtattgtggttaagtagcttagccgccagtcgtattaccagtttgttcctcgggctgaagattatctcctttgtgatcgtgtttggttcttttttcttccaggtcgattactccattctgcgcgacgccaccagctccactgcgggaacgtcttacttcccgtatatctttatggctttgccggtgtgtctggcgagttttggtttccacggcaatattcccagcctgattatttgctatggaaaacgcaaagataagttaatcaaaagcgtggtatttggtagcctgctggcgctggtgatttatctcttctggctctattgcaccatggggaatattccgcgagaaagctttaaggcgattatctccagtggcggcaacgttgatagcctggtgaaaagcttcctcggcaccaaacagcacggcattatcgagttttgcctgctggtgttctctaacttagctgttgccagtagcttctttggtgtcacgctggggttgttcgattatctggcggacctgtttaagattgataactcccacggcgggcgtttcaaaaccgtgctgttaaccttcctgccacctgcgttgttgtatctgatcttcccgaacggctttatttacgggatcggcggtgccgggctgtgcgccaccatctgggcggtcattattcccgcagtgcttgcaatcaaagctcgcaagaagtttcccaatcagatgttcacggtctggggcggcaatcttattccggcgattgtcattctctttggtataaccgtgattttgtgctggttcggcaacgtctttaacgtgttacctaaatttggctaaatccttcaagaagccagccattcgctggcttcttgcctctcaggaaatcacttatgtccaaatggcaactcgcctgatcctccttcaccacgtatgctttgcgtcaccttactatcaggacgctttagcccatgtcccgctttttgatttgtagttttgccctggttttactttatcccgccgggattgatatgtacctcgttggtttaccgcgcatcgccgccgatctcaatgccagcgaagcgcagttgcatattgcgttctccgtatatctggcggggatggcagctgcgatgttatttgccggtaaagtggccgatcgtagtgggagaaagccggtcgccatacccggcgcggcgctatttattattgccagcgtgttctgtagtctggctgaaaccagcacgttatttcttgcaggccgatttctacaggggttgggcgcaggctgttgttacgtagtggcgttcgctattttgcgcgacacgctggatgatcgacgtcgggctaaagtgctgagtttactcaacggtattacctgcatcattccggtgttagcgccagtgctcggacatctgattatgcttaaattcccgtggcagagtctgttctgggcgatggcaatgatgggcatcgcggtactgatgttgtctttgtttattttaaaagaaacgcgcccagcggcccccgcagctagcgataaaccacgagaaaatagcgagagcctgcttaaccgttttttcctcagccgtgttgttatcaccaccctcagcgttagcgtgatcctcactttcgtcaacacgagtccggtattgctgatggaaatcatggggtttgagcgcggtgaatacgccaccattatggcgctgaccgctggcgtcagcatgaccgttagtttctccacgccatttgcgctgggaatttttaagccacgtacgttgatgatcaccagccaggtgttattcctggcggcggggatcactcttgccgttagtccttcccatgcggtttctctgtttggtatcacgctgatttgcgccggtttcagcgtaggttttggtgtggcgatgagtcaggcgttagggccgtttagtttacgcgcgggcgtagccagcagcaccttaggtattgcgcaggtttgcggtagcagtctgtggatttggctggcagcggtggttggtatcggcgcatggaatatgctgatcgggattctgattgcctgtagcatagtgagcctgttgctgattatgttcgtcgcgcctggacgccccgttgccgctcatgaagaaatccatcaccacgcttgatctcaatctgctgctttgtctgcaactgctgatgcaggagcgcagcgtaaccaaagcggcgaagcggataaacgtgacacctagcgcggtgagtaagagcctggcaaagttaagagcgtggtttgacgacccgctctttgtgaacagtccgctgggtctgagccccacaccgctgatggtcagcatggagcaaaatctggcggagtggatgcaaatgagcaacctgctgctggataaaccgcaccaccagacaccgcgcggcctgaagtttgagctggcggcggaaagtccgctgatgatgatcatgcttaatgcgctgagcaaacagatctaccaacgttacccgcaggcgaccatcaaattacgtaactgggattacgattccttagatgccattactcgtggtgaagtggatatcggtttttccggtcgcgaaagccatcctcgcagccgggagctgttaagcagcctaccgttagccattgattatgaagtgctgtttagtgatgtgccctgcgtctggttacgcaaagatcatccggcactgcatcaaacgtggaatctggacaccttcttacgttatccgcatatcagcatttgctgggaacagagcgatacctgggcgctggacaatgtgttacaggagctgggacgcgaacgcacgattgctatgagcctgccggaattcgagcagagtctgtttatggcagcgcaacccgacaatctgctactggcgaccgcgccgcgctactgtcagtactacaatcaactccatcaactgccgttggttgctcttcctctcccgtttgacgaaagccagcaaaaaaagctggaagttccttttaccctgctgtggcataaacggaacagccataatccgaagatcgtctggttacgggaaaccattaaaaacctttacgcgagcatggcataaccgaatcgtatgaaacgcgacccaatttcacaataaaatgtaaaaaagttgtaataagcttgtctgaatcgaacttttagccgctttagtctgtccatcattccagtaaatgattactcttgtattcataatggaccattaagcatggagcgaaaaatggcgactcactttgcccgagggattttaacggaaggacatctgatttctgttcgtctcccctcccagtgtcatcaagaagcccgaaacattccccctcatcgtcaaagccgttttctggcgtccagaggtttactcgcagaactgatgttcatgctgtatggcattggcgaattgccggaaatcgtcaccctgccgaaaggtaaaccggttttcagtgataaaaatttgcctagcttttccatttcctatgccgggaatatggttggcgtggcgttaacaaccgaaggtgaatgtggcctcgatatggaactacagcgtgcgacgcgcgggtttcatagcccacacgcgcccgataaccacaccttttccagcaatgaaagcctatggatcagtaaacaaaacgatcctaacgaagcgcgggcgcagctcatcacgctgcgccgaagcgtgctaaaactaaccggtgatgttttgaatgacgatccgcgcgatctgcagctgctgcccattgccggacgcctgaaatgtgctcatgtaaatcatgtagaagcgttatgcgacgcggaagacgtgctggtgtggtccgtggcggtcacgcccacgattgaaaagctcagtgtctgggagttagatggcaaacacggctggaaaagcctgccggatattcacagccgcgccaacaatcctaccagccggatgatgcgttttgcccaactctctaccgtgaaggcttttagcccaaattgatagacaaccacaggagtcatcatgtctgaaaaattgcaggtggttacgttactggggagcctgcgcaaaggcagttttaatggcatggttgcacgtaccctgccgaaaattgctccggcgagcatggaagtcaatgcgttaccatccattgccgacattcccttgtatgacgctgacgtacagcaggaagaaggttttccagcaacggttgaagctctggcggaacagatccgtcaggctgacggtgtggtgatcgtcacgccggaatataactacagcgtaccgggtgggctgaaaaatgccatcgactggctttcccgcctgccggatcaaccgctggccggtaaaccggtattgattcagaccagcagtatgggcgtgattggcggcgcgcgctgtcagtatcacctgcgccagattctggttttcctcgatgcaatggtgatgaacaagccggaatttatgggcggcgtgattcagaacaaagttgatccgcaaaccggagaagtgattgatcagggtacgctggaccacctgaccgggcaattgaccgcatttggtgagtttattcagcgagttaagatctaaataaaaaacccgccagcaatcatgcatggcgggtttttaacgcgctatcgattttagtgagcgtcgataaagacaatcttcaggataaacagcagcgcaacgatgattacgcacgggcttagatcacgcagacgtccggtaccgattttcatcacgcagtaggagataaagcccagcgcgataccttcggtaatgctgaagctgaacggcatcatcacggcggtaataaacgccggaacagattcagtaagatcctgccagttcacgcgtgccagactggaagtcatcagcacgccaacgtaaatcagcgcaccagctgcagcgtagcctggcaccatccccgccagcgggctcagaaagataaccagcaggaacagcagaccaacaaccactgccgtcagaccggtacgaccgccaacgcttacgccggaagaggactcaatataagccgtaacggaagaagtaccgataaagctaccggtcacggaagagatactgtcgacatacagcgcctgcttcatgcgcgggaatttccccttctcatccgccagacctgctttatcggtcacgccaatcagcgtaccggaggagtcaaacaagttgaccaacatgaaagagaaaatcacccctgccagcccgaggttaaagctcccggctaaatctacatgacccacaactgtcattacgctcggcggcgcagaaacgatgccattgtagtgcacatcacccagcatccagcccagcagcgtcgtcaccacgatagaaaccagcaccgctgcgtgaatgttgcggctggccagaatagcaatgatgaagaagccgaggatacccagaagtacgctgtgagaagtcagattaccgatgctcaccagcgtttccgggttagcgacaatcacacctgcgtttttcagccccatcatgccaatgaacagaccgataccgctggtaatacccacacgcagactcaccggaatgttggctatcatccagtagcgaacgcggaaaatcgtcagtaacagcagacctatcgcgccccagaagattgcgcccatcccgacctgccacggcaagcccatcgcctgtacaacgacaaaagcgaagaacgcattcaggcccatagcgggtgccagtgcaactggcaggttagcaaacagtcccatcataatactgccgaatgcagcgatcagacaggtagtgacgaagacggcgctggtatccatgccagcaacgccaagaatttgcgggttaacaaaaacgatgtaaaccatcgtcaggaaggtggtaaaaccggcgatcacttcggtccgtgccgtcgtgccatgttcgcgcagtttaaacacgcgttccagcatcccctgaccagaagtctgggtggtatgttgatgactcattatctatttccgaacaaggagggaaaatccgtcgctatcgtataccaaaatgcgacaataggcgcgtttgtgagagacttttttattggatttacttatacggcaacgattgcgttgcgcaaatcggctctacgaaaacgttaaactgattaaaaaggaaaggcatgtcccggatagaagcggtatttttcgactgcgacggtacgctggtcgacagtgaagtcatttgctctcgcgcatatgtaacgatgtttcaggaatttggtattacgctcgatcctgaagaggtattcaaacgtttcaaaggtgtaaaactgtacgaaattatcgatattgtttcccttgaacatggtgttacgttagcgaaaacagaagctgaacacgtttaccgtgcagaagtcgctcggctgttcgatagtgaactggaagccatcgaaggggctggagcgctcctgagtgcgatcactgcgccaatgtgtgtggtatctaacggcccaaataacaaaatgcagcattctatgggcaagctgaatatgttgcactacttcccggataaactgttcagcggctacgatattcagcgctggaagccagacccggcgttaatgttccatgcggcaaaagcgatgaatgtaaatgtagaaaactgcattctggttgatgacagtgttgccggtgcacaatctggtatcgacgcaggtatggaagtgttctacttctgcgccgacccgcacaataagccgatcgttcacccgaaagtcaccacctttacccatcttagccagttacctgaactgtggaaagcgcgtggttgggatattacggcataattcttcacactcccttcacttaccccgcttaaattggcgctcaaaggtaagtaaagggagtttgatatgtctgttagtcgtcgggtaatacatcacggactttattttgcagttttaggaccgttaattggtgttctgtttcttgtcctctacatattcttcgcaaaagaaccgctggttctttgggtgataatacatccaatttttctcttattgagcataactacgggagctattcctgcgttgttaaccggtgtaatggttgcctgtctgccggaaaagatcgggagtcagaaacgttatcgttgtctggctggtggcataggtggcgtcgttatcaccgagatctattgtgcagttattgtacatattaagggcatggcttccagcgagttgtttgaaaacattctttctggtgacagtctcgttgtccgcatcattcctgcattgctggcaggtgtggtgatgagcagaatcattacccgtctacccggattggatattagttgtcctgaaacagactctttaagttaagcgggatactttatctttgggctactcaaaagcagacaggatgtttctatgactcaaaatatcaggccgttaccccaattcaaatatcatcccaagccactggaaacaggcgcatttgaacaggataaaaccgtagagtgcgattgctgtgaacaacagacgagtgtttattacagcggtcccttttattgcgttgatgaagttgaacatctctgtccgtggtgtattgcggacggttctgctgctgaaaagtttgcaggtagttttcaggatgatgccagcatagaaggtgttgaatttgagtatgatgaagaggacgaatttgccggtattaagaacacatatcctgatgaaatgctgaaagagttggttgaacgcacgccaggttatcatggatggcagcaggaattctggctcgcgcattgtggcgatttctgtgtttttatcggctatgtgggctggaatgatataaaagatcgcctcgatgaatttgccaaccttgaagaagattgtgagaatttcggtattagaaattctgatctagctaaatgcctgcaaaagggtggtcattgtcagggttatctcttccgctgtctccactgcggcaagctgagactgtggggtgattttagctaattatttaaataatgagaacaggccggagcgtaattcacacatccggccttatttcttaagcttaaccgagtgctaattctgcggcagcggctttatcagcgattaccatcaggctaggatgcagctgcaacacggaagctggaacatcttcggtaaccggaccttgcagaacatttttcagtgcctgcgctttacccgcgccgctgacaattatcagcaagtttttcgccgccatgatgcttttcggccccatcgtcacgtagctgtcaggcactaagctaaagtcgccgcccaactcgccatgcgccacaatatcaaccatctctccctggatcgggaactccacggtttgctcatggaaatgggtcgtattcggcaaattgccacaaaaatgaccatctgcacctaatcccagcaccaccaaatccagtccgccttcacgcgccagtttctgatcatgctcgcggtagttatcaatagtgagcttctggatattctcttctttgatccccgcaggggtgaaaaacagattacgcagattggtaatcgttacgccttctccctctttgccgcgaaatggaatttcatcaaaattatagaaatagcagttatcgtaccagggcttacctttaaccagggtggtgaggtattcatacatgcctttgggcgtgctaccggcggtaattgccaggttaacacgacgcgtcttgctcatataaccaagcagatggtgtgccgcgacacggctcatttcctggtaatcttcggtaatgattaatttcatcttaatgccttattttatttaaataatttctgtacaaaggctgcataggctggtcgccagacatccatttcatggttcagacccggatattcctggtaatcaaagttaatttttttctgctcaagctcagttttcagcccggcgatatccttgccggttacgacatctttatcccccacaaccacagtaaaattacgtagttgctggttgatagctgccggatcgttcagtcgggccgcgacaccttcatccggtacggttgtcgtggtaacaccactgaatgtggccagccagccaaagctttccagatgattcattccggaaaccagcgcctggtacccgccttgactaagccctgccagcgcgcggccatcggcatctttacggacattaaaacgcttgctaatcagcgggataatatcgttcatcagttcgcgatctgccgctttagcattcagcggataaaagactttacgtctttcctgaggcacgaaatcttcgggaataatgcccttcgcatcggtttctgtatccgggatcaccaccagcatcggtttaattttcccttcagcaagcaggttatccatgatttgcgggatacgcccctgatcgatagcggaacgtccggtatcaccaaagccgtgatagaaatagagcactggcaaaggctcgcccatgccggtgtatcctggcggggtccagacatacatctgacgttcagattgcaatgcgttggagtggtaagttatggcgatcaaatcaccatgcgcaacagaacgcgtatccagataactgcctggcaccagaatcatactggagttaacctggcgctgaggattagtcattgcggtgcctgtatcaatgctgcgtacaccatcaacattgaaaaaatactcgtacaggttgcctttcaggataggtgtgcgccagctccagactcctgcttcgtctttggtcatcgggtgaatattgtccggaaccggaacacccaccactacagagacattttttgccccaggggcaaagtagcgaaaggtcacgctgttatcggcattgacctgagtcacatactgtttcaccgggatagtgggtgccgggctggctggcatatccgctgctatggcccactgagcagaaataccgctggcaatagccagcgttaaagcagcaatttttatattcatcgtaatattcctttcattaagttccattaccaccagatttcagcctgggcaccgacagcaaactggtcgtctttattgtcttcaaaggtgaagccatccagttcgttttccagggctttgatatacgtggcgtagaaacgaatttccggacggctggtcaacatactggtattgactttaaaggtatggaagagcgtggttttataaccagactcattaaatttattactattcgcatctttgttttgctgggtgaaatagcccagttcaacacctgtctggttatattggtcccaaatataggccgggcgaacaaccgcacgaatagattcgaaatcagagtgggcgcctgtttcgtagctatatatatcgttaccgaaggagtaaacaatcgcgttagctacaatgaaatgatcgccaatataggcttcgccctggctagtcagacgtaccgctgttccgccggtgtgatcaccataataacgaccattaaaggtggtaaatggacttgcgccagcataacggccaaagttactggcgatagagttattcgcgaccaggaaggagaattcgttgaagccacctttatcaaatttctgcgttaaagatgtgccaaacatccaggtatctttccagtcataatacccgttattatcctgattatctttttcgcttgcgctttcgtttgccgtgacataacgaccacttaccattaaggtggctttatcccataacgggatatctttatagcgtaaatcaatggtattggtattaatctgctgtttgttttgcaggctgcgatcgtaatcatcgacatcttcgcgaaccagcgcgatatcaattttacccggaccgactttccagttttccagacctacacccgctgcggcatcagtacgctgcgttttccagtcaagcatctggatttcaattttcggcgcaccgtgtttacccacccagaaatcagcctctggcgcaaagggcaggaaacctttggtggtaacgtacatatcggagaactgcatatagttctcgccaccggcgttatcgccaaaccagccggtagagtactgctgaccaacgttaccatccatcatcacaacggcatcaacccgtttgccgttttcgttgtagacacgttgttttaactgcaaatcaaaccagccggagtattcgttaccaaagcggcccagagaaccaatcgcccaacttttaggactaccatgagaggcggtcccccaaccagaacggtaatagccgttgtaactaaagccaatttcatctttcacaaatttactgaaatctttcagagtcatggaagaataaatgctgcctgtctcactggcatttttctcttcatttttgaccagtacagcatcaggttttgcggcactactggtcgggaacggattggcggcatacccttgatcattcgtacttacgctacgattcaccgtcgctggcgtatactttttcttctcttcatctttatactttttgagttcgctttgcgtttctcttaacgccttttctaataactcaaggcgttgttccaccgttaaactttcagccaaactttgtgcagaaaaggctaacggtgccattaataagatggcagaggtaataagatttcgtctaaacataatatccctttatggtgcaaagaaagaattaacgcatcgcatccagactgttctgaatgcgacgataattaaggtgctttaatggttattttttttaaactcagcccccgcgtcttgatcacctctgcataccatccgaagcttttcttgcgtgttcttgtgaggcttccttcgccattatcatcacgatccacataaataaagccgtagcgcttagacatttgactatgagatgcactgactaaatcaattggcccccaactggtgtaccccataatatccacaccatcggcaatcgcttcatttacctgtaccaggtgatcgtttaaataggcaattcgataatcgtcctgtatgctaccatccgcttcaacgctgtcttttgcgcctaatccgttctcgacaataaataacggtttttgataacgatcccaaagcgtatttaacagaacccgtaatccaaccggatcaatttgccacccccactcactacttttcagatgcggattggggatcatattcagtatgttgccctgcgcatttttattaatgctttcgtcgtgggaaacacaaccagtcatgtaataactaaaagagatgaaatcgacggtatgttttaaatcttctgcgtcactttcagtcatctcaatggtgatattgtggtcgcggaagaaacgctgcatatagccgggatactggccacgcgcctgaacatcaccaaagaacatccagcgccggttctcttccatggcctgcaacatatcctgtggctggcaggtgagggggtaaaccagcccaccgagaagcatattgccgattttcgcttcggggagcaggctatgacaggctttaactgcccgcgcactggcaaccagttgatggtggatagcctgataaacttccgcctcgccactctcttctgccagccccacgcccgtgaatggcgcgtgtaagctcatgttgatttcattaaacgtcagccataacgccactttatgttggtagcgagtaaagaccgtgcgggcgtaatgctcgaagtgatcgatgaccgctcgattagcccaaccgccgtagtttttcaccagcccatatggcatttcgtaatgggataacgttaccagcggcttgatccccgcctgcgccatttcatcaaacagccgatcgtaaaacgctaaccccgcttcattcggttcgacttcgtcgccctgagggaaaattcgcgcccaggcaatggaaatacgcagacaggtgaagcccatctcggcaaataacgcgatatcttccgggtaacggtgataaaaatcgatggcgacatctttgatattctctttccccaggatgcgcggttccatttttcccattacgccatgaggctgtaaatcactggtgctgatccctttgccatcttcctgccaggcaccttccacctgattggcagctgttgcgccaccccaaagaaatgtttctggaaatgctttcataattaactccttttatcgttagcgaatgatggataacagcggttcacctgcgcttatctgcgccgtgccgtggggtaatacgtccgtaaaatcatcgctattactgattaataccggcgtcgtcagatcaaatccggcctcgcgaatagcagggatatcaaaagaaatcagccgatcgcctgtattgaccttgtcacccacgttgacgtgagcggaaaagaatttgccgtccagttttacggtgtcgataccgacatgaatcaggatctccacaccatcatcactctcaatgccaatggcgtgtaatgtggcgaacaagctagcaattcgacccgcaaccggagaacgcacttcaccaacgctgggcagaatggcaatacctttacccaacaggccactggcaaacgtggtatcagcgacgtgaatgagcggcacaatctctcccgtcatcggactacagataccgccctgctcaggtggtgtaataacctctggtgttttctcttgcggggcaccctgcgctggctgacgtttagcggtgatgaaatgaagcatcaccgtaccgacaaatgcgcaaccgatggcaatgacaccgccaataacgctggcccagacggtgaaatcaattcccgtactcgggatggtttgcatgaaggtgaaaatacttggcaaaccaaaggagtagactttcgtttgcgcgtagccaataatggtggccccccaaagccccactgatacaggcgataacaaaggggtacttacgcggcaggttgacgccatataccgctggttcggtgataccaaacagactcgtcaacgccgcacttcccgccaccacttttttctgcgcatcgcgttcgcagaggaagacgccgagcgccgccccgacctgcgccataatggcgggcattaacagcgggatcatggtgtcgtagcccagcacggtgaagttattgatacacagcggcaccaggccccagtgcagtccgaacatgacgaagatttgccagaagccgcccattaccgcgcccgcaaatgcaggaaccgcctgataaagccagagataaccggcggcaatcagttcgcttatccaggtacttagcggccccaccagcagaaaggtgacgggtgtgataaccatcagacatagcaatggtgtgaagaaatttttgattgcgctcggtaaccacgcattaagtcggcgttccagaatgctgcacaaccaggcagaaaaaataatgggaataacgctactgctgtaattcaacaatgtgaccggaatacccaggaaatccagccccagcgcatccgctttttgcccgttctcgaaagcagtcagaattaatggatgcactaacgctccaccaatcaccatggcagtaaatggattaccgccgaagcgtttccccgcggtgtatcccaggattatcgggaagaaccaaaacaaggcatcactggcgctgaataaaattaaataagtaccactttgttcggtcgtccactgaaaagtgagcgccagagccagcatacctttcaagatcccggttgccgccatcaaaccgatcagaggcgtaaaaataccactaataacataaacaaagcggtttagcagattacctttatcatcattttccggtgcctgttgcgctttttcgtcaaggcctgccacactgttaaccgccaggaagacatcggccacatggttacctatgaccacctgaaactggccaccgctttccaccaccataataataccgggggtctttttcagtacctctgcttgcgctttgctttcatcctttaatttaaaacgtaatcgcgttgcgcaatgcatcagactcacaatgttatctgcgcccccgactcctgcgactatttttctggctaactccgtcataacttgccctctaccgctttgcggcaaaactccaaaaaaaaacctgaaaaaaacggcctgacgtgaatcaagcaatttttttcaggttttgcccgcttagtgcggtaacaatcctttactcagtaataatatttcagtgttctttgcgcacgcgctctatatttatggctaaaaacataatctctgcgggactaattttacgttgatactgcaaaccaataaaaatggcgatccgttccgcacattgccatgcttgcgggtaattttgttttactgcttgttgtaaactttcatcactatcgttaatactagcatgttcaagaatacgccaggataaaaacttcagatgtgtaaccagtcgctgataactcaagctttcttcctggtaattaaggctgaactgaaattttattaattgcagcatttcgcgcattaactgcgtgacacctgcaacatcctccatatttccgctcatttgggcactgaccagatgcatggcaataaagcccacttcatctttcggtaactgcacgcccaaccgtttatcaataatggttaacgcttcttcccctagctggaactctttcgggtaaagccgctggatatcccacagcaacgggttgggcagcaacacgttttgctgaaagcgtttaatcgcaaactggcaatggtcagttaggctgatataaatactgtcctgtaattttcccaagcgctcctgcgctaaagagataatacgatcacaggttgccatcacctcaagaggaatatgacttaagagttcgcttaatcgcccgttcagttcatgactgctcaaggcatactctttttctattccactactgttaattctttcgccagcgcgtttttgaaagccaattccgcgccccatgacgactttttcccgctgttgatcatcaataaccaccacaacattattgttgagaattttggtgatttgcatgttcatagcaaggaccttttttataaacaaaaaaacccgacttcaccagtattctctggttatgtcaggttttgcctgcgaatgcagtaacaatccagtcatttattaatggtttttataacgaacatccaggttcggaaattaatttaattgcgtgcagagaaaatagcaatgcgctattgataaaaatatgaccatgctcgcagttattaactttgtgtaattttaggaatttataaagttatatataacaaatcccaataattaagttattgggatttgtctggtgaattatttgtcgctatctttccccgccagcagtttatccagctcatcgccaccgacgtgacggaaatcctgccccttcacgtagtagaagataaactcacaaatattctggcagcggtcgccaatacgttcgatagaacgcgcgcagaacagcgcagtaagtacgctcggaatggtacggctatcttccatcatgtaggtcatcagttgacgaacaataccttcgtattcctgatcgacttttttatcttcacgataaatacgtaccgcttcgtcaatgtccatccgcgcgaacgcgtccagcacgtcgtgcagcatctggatggtatgacggcccaggctctccagacttaccagcaacggctgatgctgctgggagaatttctccagcgcagtacggcagattttgtccgccacgtcgccaatacgctccagctcggcaatggttttactgatcaccataaccagtcgcaggtcgctcgccgtcggctgacgtttggcgataatgcgcacgcaggcttcatcgatcgccacttccatcatgttgacgttcttgtcgccttcgatgacgcgcttcgccagatcgctgtcctggttatgcatcgcggtgattgcatcagaaagctgctgctccaccatgccgcccatggtcatcacctgcgtgcggatactttccagttcggcgttgaactggccggaaatatgtttattaagattgagactgtccataacgcactcctgaatcaaccgtaacgaccggtgatgtagtcttctgtttgtttcttcgctggcttggtgaacagatcgtccgtgttgctgaactcaatcaattcgcccaggtacataaacgccgtgtggtcggaacaacgcgcagcctgctgcatgttgtgggtgacgatcaccacggtgtaatcctgcttcagttcggtgatcagctcttcaatacgcccggtagagatagggtcgagcgcgctacacggttcgtcgagcagcagcacttccgggcgaatggcgataccacgcgcaatacacagacgctgttgctgaccaccagagagagagtaaccgctctggtgcaatttatctttggtttcgttccacaatgcggctttggtcaatgcccactgcacgcgctcgtccatgtcggcacgggagagcttctcaaacagacgaacgccaaaagcgatgttgtcgtagatggacatcggaaacggcgtcggtttctggaacaccatgcccactttcgcacgcagcagtgcgatatcctgagagttggtcaggatgttgtcgccatcaagcagaatttcaccttccgcacgctgctccgggtacagttcaaacattttgttgaaggtacgcagcagcgtgcttttaccgcagccggacggcccgataaacgccgttacctggtttttagcgatatccaggttgatgtttttcagggcatggaatttgccgtagtagaagttcaaattacgaacctgaattttactcggggcagtttcaaccatactcattgcaatcttttcctcatcgtgcctgatgcacttcgctaatcaggcttaccgtaggccggatcaggcgttcacgccgcatccggcaaagtgttaaccgtgtacagagtcaaaaaggcgctcggtcggtcccctcgcccctctggggagagggttagggtgaggggaaaaccgtgtcagcaatatcaaccgtgtttattcttcgcaaaaacaacgcgcgccagaatgttcagcagcagtacgcacagggtaatgatcaataccccggcccaggccaattgctgccattccgcaaacgggctcatcgcaaacttaaagatcgtcaccggcaggttggcgatcggctgcatcatgtccgtgctccagaactggttggagagcgcggtaaacagcagcggcgcggtttcaccagcaatacgggcaatcgccagcaggataccggtcataatcccggacacgctcgctttcagcgtaatcgcagagatcatcttccacttcggtgtacccagcgcataagccgcttcacgcaggctgtacggcaccagtttcagcatgttctcggtggtgcggataacaatcggcacctgcaacaacgccagggcaatcacgcccgcccagccggagaagtgctccatctgcgccaccacaatggtgtaaacaaacagaccaaccacaatgctcggcgcagagagcagaatgtcgttaatgaagcgaatcacttctgccagccaggatttacgaccatattccgccagataaatccccgccataatgcccagcggcgtaccgaataccgtggcccacaaaattaacagcccgctacccgccagagcgttcgccagaccaccaccttccgtattgggcggcggcgtcatttcagtgaacagcgccaggctcataccgtcgataccgcgagtgatggtggacattaaaatccagatcagccagaacaggccgaaggccatcgtcgccatgctgagcgtcagcgcaatacggtttttgaggcggcgacgcgcctgcattttgcggcgagattcagccagcgccgcagtggtttgcatttcaaccatagccattagcgtgccccctcattcttagccaggcgcataatcataaacttgcttgcggcgaggacgatgaaggtaatcacaaacaggatcaggcccagttccatcagtgcggcaacgtgcagaccggattccgcttccgcaaattcgttcgccagcgcagaggtgatactgttgcccggcatatacaggctggcgctgtcgagctggtaggtgttaccgatgataaaggtcaccgccatggtttcaccgagcgcgcggcccagccccagcatgatgccgccgataacaccatttttggtgaacggaagaacgatacgccagataacttcccaggtggtgcagccaataccgtaggcgctctctttcatcatcaccggggtttgttcgaacacatcacgcattaccgccgcaatgtacggaataatcatgatggcgaggatcacgcctgccgcgaggataccgataccaaatgcggggccagagaacagcgcgccaacaatcgggatattgctcatgatattgccgaccggctcctgaaagtaaacggcgaacagcggcgcaaagataaacaggccccacatgccgtaaacgatacttggaatggctgccagcagctcaatggcgatacccagcgggcgtttcagccagccaggcgcaagctcagtcaggaacagggcgataccgaaactcaccgggacggcgatcagcagcgcgataaagctagtcaccaacgtaccgtagatcggcaccagcgccccgtagatatcgttcggtgcatcccactctttggtccataggaaagccagaccaaatttctgaatgctcggccaggaggagatgatcagagagacaataatgccacccaacatcaatagcacaatcagcgccgccagttttaccagcacgctgaaaattatgtcgccctttttacccggtgggttaaaagcaggcttggttgcagccataagttactcttcagttaaacgcgtttacaaagtcattttgtaatgccggatgcggcgtaaaacaccgtacccggcctggagttttattagtacagcggcttaccgctactgtctttaatattggtcttccacgcagcgcgaacctgttcaactacactatccggcaggctggcgtaatccaggtcgttcgcctgtttagccccggttttgtacgcccagtcgaagaatttcagcacttctgtgccttgttctggtttcttctgatctttgtggatcagaatgaacgtggtagaggtaataggccatgcatcttcgcctttctggttggtcagatcctgagcgaaggttttgctccagtctgcaccttttgctgcattagcgaagttttcttcggtcggactaaccggtttaccatcagcggagatcagtttggtgtacgccaggttgttctgcttcgcgtaagcatattcaacataaccaattgcacccggcagacgctgaacgaacgcggcgataccgtcgttacctttaccgcccagaccgatcggccattttacggtagagccagtaccaacgttgtttttccactcttcgttcactttcgccaggtagctggtgaagacgaaggaagtcccggagccatctgcgcggcgtactacagcaatgttttgactaggcagtttcagacccggattcagtttggcgatggcttcatcatcccacttcttgattttgcccaggtagatgtcgccgagggttttaccatccagcaccagttcgccagacttcagccctggaatgttaaccgccagcaccacgccgccaatcacggtcgggaactggaacagaccttcctgagccagtttttcgtcagacagcggcgcgtcagaggcaccaaaatcaacggtattagcgataatctgttttacgccaccggaagaaccgataccctggtagttaactttattaccggtttctttctggtaagtgtcagcccatttggcatacaccggcgcagggaaggttgcacctgcacctgtcaggcttgcttctgcaaacacagagaaagcactcatgcttaaggtcgcggcgacaacagttgcgacggtggtacgcataactttcataatgtctcctgggaggattcataaagcattgtttgttggctacgagaagcaaaataggacaaacaggtgacagttatatgtaaggaatatgacagttttatgacagagagataaagtcttcagtctgatttaaataagcgttgatattcagtcaattacaaacattaataacgaagagatgacagaaaaattttcattctgtgacagagaaaaagtagccgaagatgacggtttgtcacatggagttggcaggatgtttgattaaaaacataacaggaagaaaaatgccccgcttacgcagggcatccatttattactcaaccgtaacgctttttgccaggttacgcggctggtcaacgtcggtgcctttgatcagcgcgacatggtaagccagcagctgcagcggaacggtgtagaagatcggtgcaatcacctcttccacatgcggcatctcgatgatgtgcatgttatcgctacttacaaaacccgcatcctgatcggcgaagacatacaactgaccgccacgcgcgcgaacttcttcaatgttggatttcagtttttccagcaattcgttgttcggtgcaacaacaataaccggcatatcggcatcaattagcgccagcggaccgtgtttcagttcgccagcagcgtaggcttcagcgtgaatgtaagagatctctttcaacttcaatgcgccttccagcgcgattgggtactgatcgccacggcccaggaacagcgcgtgatgtttgtcagagaaatcttctgccagcgcttcaatgcgtttgtcctgagacagcatctgctcaatacggctcggcagcgcctgcagaccatgcacgatgtcatgttcaatggaggcatccagacctttcaggcgagacagcttcgccaccagcatcaacagcacagttaactgagtggtgaatgctttagtggatgccacgccgatttctgtacccgcgttggtcattagcgccagatcggattcgcgcaccagagaagaacccggaacgttacagattgccagactaccaaggtaacccagctctttgctcagacgcaggccagccagggtatccgcggtttcgccagactgactcaaggtgatcatcaggctgttacgacgcacggcagatttgcgatagcggaattcagaggcgatttcgacgtcgcacggaatacctgctaggctttcaaaccagtagcgggaaaccataccggagttataagaagtaccacaggcgaggatctgaatatgctcaaccttgctcagcagttcgtcggcgttcggtcccagctcgcttaaatcaacctgaccgtggctgatgcgtccggtaagggtgtttttgatcgcgttcggctgttcgtagatctctttctgcatgtagtgacggtaaatgcctttatcgcccgcgtcatattgcagattggattcgatatcctgacgttttacttccgcgccagttttatcgaagatgtttacgctacggcgagtgatttccgcaatatcgccctcttcaaggaagataaagcgacgggtcaccggcaacagcgccagctggtcagaagcgataaagttttcgcccatccccaggccaatcaccagcggactaccagaacgtgccgccagcagggtatccgggtgacgggagtccatgatcactgtaccgtacgcaccacgcagctgcgggatagcacgcagaacggcctcacgcagagtcccgccttgtttcagctcccagttcaccagatgggcaatcacttcggtgtcggtttcagaaacgaaggtatagccacgcgcttttagctcttcacgcagcggttcatggttttcgatgatgccgttatgcaccaccacaatgtgttcagaaacatgcggatgcgcattcacttcactaggttcaccgtgggtcgcccagcgagtgtgagcaataccagtgccgccatgcagaggatgttcttccgctgcctgtgccagcatctggactttaccgaggcgacgcaggcgggtcatatgaccttctgcatcaacaacggccagaccggcagagtcatatccgcggtattccagacgacgtaaaccttcaagaaggatttctgctacatcacgttgcgcgatcgcgccaacaattccacacatagtttttgattccgatttatatcgttgtcggtcaacctgtatgcccgttttttcgggcgccccgagccttgtagagagtggggttatttttatagttactgcttgtgggagggagattatgttatctcctcatcccatgtgaccgggttagccggccagaatcactttttctttaccggacgacgccagccttctttctgagtctgcggcacacggctgatagctaatgcattttcgccgacattacgcgtcacagttgtacccgcagcaatggtcgcgcctttgcctactgttaccggggccaccagctgagtgtcggaaccaacaaacacatcgtcgccgataatggtcttaaatttattcgcaccatcgtagttgcaggtaatggttcccgcgccgatgttaacgttatcgccaatttccgcatcgcccaggtaagtcagatgaccagctttgctgcctttacccagacgcgcttttttcatctcaacgaagttaccgacgtgagcaccttccagcaactcagcaccaggacgcaaacgggcaaacgggccaatggtacaggccgctgccagattcgcatcttccacaacggtatacggactgatttcgcaatcatcgccaatcacgctgtttttaatcacgcaaccggtgccaattttcacgcgatgaccgagagtcacgttgccctcgatgataacgttagtatcaatttcaacatcgcgcccgtgagttagcgtaccacgcagatcaaaacgcgctggatcgcgcagcataacgcctgctaacagcagtttttcagcctgttcggactgataaacacgctccagacgggagagttgcaggcggttattcacgccttctacttcgcttaaacgttgcggatgaacggcgacgatttcacgcccttcctgatacgccagcgcaataatgtcggtgatgtagtattcgccctgagcattattgttggtcagcttcgccagccagcgtttcatatctgcgccgttggcaatcagaatgccggtgttgatctcctgaatctgacgctgctcgtcggtggcatctttgtgctcaacaatgccggtaactttgccgttttcacgggtgatacgtccataaccggtcggatcatccagtttcaccgtcagcagaccaatgccaccctgcggtttagcatcacgcagacgctggagtgtttcgacagagatcagcggcacgtcgccgtagagcattaaaatgtcttcatcatcggcaaagaaaggtgcggcctgctgcattgcatgacccgtacccagctgctctgcctgaagcacccagttaaggttgtcgtctttcagcgcctgttttagcagatcgccgccgtgaccgtacaccaggtgaacgtgcgctgcgcctaattcattcgcagcatcaatgacatgctgaaccatcgctttcccggcaagggtatgcagcactttcggaagatcggaatacatgcgcgtgcctttgcctgcggcaaggatcactacgctcatagcattattcaacatacgcgtcctgactgtaatttgagaacgaatttaaaccgcttcaccttgaaaaaactacatttttttcatcgtgaaatggacagaggataaattgttcaataacggattatccccgctgacgaaagcgccattttcgaccatcgtcacgccttttgtctgcagaaaattaaggcagtaccttaatttaagcgtcaggtggatgtttttgctcttatttcgatcaatgaataaacaggaaaacaggggggttttatatcagcaggatctatgtgaacgctattcaggacgggtcacacgcgcaaaaaaaagccagcctgtttccagactggcttttgtgcttttcaagccggtgttacatcgcttttttggtcaactcgataacgcgcagctgcgcgatcgctttggccagttccgcagacgcctgagcgtaatctacgtcgccgtgagagctgctaatgtgctcttcagccttacgtttcgcttccatggctcgcgcttcgtcgagatcctggccgcgaattgcggtgtcggccagaacggtcacgttgccaggctgcacttcaagaatgccgccagacagatagataaactcttcgtgaccgtgctgtttcacgatgcgaatcataccaggcttaatggcggtgagcagcggtgcgtggccagggtagatccccagttcaccttcgctacccgttacctggattttctcgaccagaccagagaacatttgttgctctgcgctgacgacgtccaggtggtaagtcattgccatatcaccctccgattaaggcgttaaagttttttggctttttccacagcttcttcgatggaaccgaccatgtagaacgcctgctccggcaggtgatcgtattcgccttccatgatgcctttaaagccacggatggtgtctttcagggagacgtatttacccggagaaccggtgaatacttctgccacgaagaacggctgggacaggaagcgctggatcttacgagcacgcgctaccaccagtttgtcttcttcagacagttcatccatacccaggatggcgatgatgtctttcagttcctgataacgttgcaggatggactgaacgccacgcgcggtgtcgtagtgttcctgaccaaccaccagcgggtccagctgacggctggtggagtccagcgggtcaacggccgggtagatacccagagacgcgatctgacggctcagtaccacggttgcgtcaaggtgcgcaaaggtggttgccggagacgggtcagtcaagtcatccgcaggtacgtatactgcctgtacggaggtgatagaaccagttttggtggaggtgatacgttcctgcagaacgcccatctcttccgccagggtcggctgataacctaccgcactaggcatacggcccagcagtgcggatacttccgtaccggccagggtgtaacgatagatgttgtcaacgaacagcagaacgtcacgaccttcgtcacggaatttctcagccatggtcagaccggtcagagcaacgcgcagacggtttcccggcggctcgttcatctggccatacaccagggatactttgtcgataacgttggagtcggtcatttcgtggtagaagtcgttaccctcacgagtacgttcacctacgcccgcaaacacagagtaaccggagtgctcgatcgcgatgttacgaatgagctccatcatgtttacggttttacctacacccgcaccaccgaacagaccaactttaccgcccttagcgaacggacacatcaggtcgataactttgataccggtttccagcagttcctgagagttactcagctcttcgtaggaaggtgctgcgcggtgaatcgcccaacgctcttcttcaccgatctcgcctttcatgtcgaccggttcacccagtacgttcatgatacggcccagagtcgctttacctaccgggacttcaatcgggtgttcgaggtcttttacatccagaccgcgacgcagaccgtcggaggaacccattgcgatggtacgtacgataccgccgccgagctgctgctgaacttccagcaccagacgctcattaccattttgcacctcaagagcatcgtacacgcgcggtacggcatcctgagggaattcgacgtcaactacggcgccgattacctggacaatctttccagtagccatcttaaatcctctacgaaataacctgtttaaaccgcggcggccccgctgacgatctcggtgagttcctgagtaatgctggcctgacgagctttgttgtataccaactgcagctctttaatcaggctgccgccattgtcggtcgcggctttcatcgccaccatacgggcggcctgctcgctggccaggttttcaaccacgccctgataaacctgagattcgacataacgacgcagcagggtatccagcaacgccttcggatcgggttcgtacaggtaatcccaggatttatgtttcagatcatcatcatcacttgccggtaacggcagcagctggctgatggtcggaacctgagacatggtgttaataaatttgttgctgacaatgtaaagcttgtccagacggccttcgtcgtaggcctgcaacatcacttttaccggaccgatcagttcggacagggaagggttatcccccatgccggtgacctgggcaacaacattgccgcccacggagttgaagaagctcacgcctttgctgccgatcattgcgaggtcgcattgaacgcctttgtcggtccaggtcttcatttccgccagcagttttttgaacaggttaatgttcaaaccaccgcacaaaccacggtcggtgctcaccaccaggtagcccacgcgtttaacgtcgcggtcttccaggtaagggtgcttatattccagattaccgtgtgcaaggtgaccaatcactttgcgcatggtttctgcataaggacggctggccgccatgcgatcctggcttttacgcattttggaagcggcgaccatctccatcgctttagtgatcttttgcgtgttctggacgcttgcgatcttactacgtatctcttttgcgccggccatgagcttctcctcaatgccttgcggcctgccctaaggcaagccgccagacgttaccaggattgggttgctttgaaggaatcgaggatgcctttcagcttgccttcgatttcgtcgttgtagccaccggtctggttgatctcttgcatcaacggagcgtgatcacggtcgacgtaagccagcagagcggcttcgaagctgccaattttgctcagttcaacatccgccaggtaaccacgttctgctgcgaacagaaccagagactgctgcgcaacggacatcggcgcatactgtttctgtttcagcagttcggtcactttctgaccgtggtcaagctgcttacgtgttgcatcgtcaaggtcggatgcaaactgagagaacgctgccagttcacgatactgtgccagagcggtacggataccaccggacagttttttcatgatcttggtctgtgctgcaccaccaacacgggatacggaaatacccgggttaaccgcaggacgaataccggcgttgaacaggttggtttccaggaagatctgaccatcggtaatggagattacgttggtcggaacgaacgcagaaacgtcacccgcctgagtttcgataatcggcagtgcggtcagagaaccggttttccctttcacttcacctttggtgaaggcttcaacgtattcggcgttaacacgtgcagcacgctccagcagacgagagtggaggtagaaaacgtcgcccgggaatgcttcacgtcctggcggacgacggagcagcagggagatctgacggtaagcaacagcctgtttagacaggtcatcgtaaatgatcagcgcatcttcaccgcggtcacggaagtattcgcccattgcgcaaccggcatacggtgccaggtattgcagtgcagcggattcagacgcggttgctaccacaacgatggtgttagccagtgcgccgtgctcttccagtttacgtaccacgttagaaatggtggacgctttctggccgatagcgacatagatacatttgataccggaatcgcgctggttgatgatggcatcgatagccagtgcggttttacctgtctgacggtcaccgatgatcaattcacgctgaccacgaccgattgggatcatggagtcaacggctttataaccggtctgtaccggctgatctacggactgacgttcgataacgcccggagcgattgcttctacagcagagaagccgtcgtgatccagcggacctttaccgtcgattggtgcacccagagtgttaaccacacggcccagcaggccacggccaaccggaacttccaggatacggccagtacacttaactttcatgccttcggcaaggtcagcgtacggacccataacaaccgcacctacagagtcgcgctcgaggttcagtgcgatagcgtaacggttacccggcagggagatcatttcaccctgcatacaatcggccaggccgtgaatgcggataacaccgtcacttacagaaacaatagtaccttcgttgtgagcttcactcacaacattgaactgagcaatgcgctgcttgatcagttcgctgatttcggtggaattcagttgcatgctccagtccccttaagactgcaagacgtctgcaaggcgctcaagacgaccgcgtacgctgccatcaatgaccatatcacccgctcggatgataacgcctgccattacagacttatcgattttgcaattcagcttaactttgcgactcagacgtttttccatcgcagcagaaattttcgcgagctgttgttcactcagtgcggcagcggaaatgacgtctacctcagcggtagcctcactcacggcacgcaggtgaataaactgctccagaacatccgggagcgcgttaagacgaccattttcagccataacccgaatcaggttctgaccgttttcgtccagttgctcaccacaaactgcgataaagctctcggcgagcgtttctggcgcaagcgcgccagagagaagctctgccatttgttcgtttttggttacctcggcggcaaacgccagcatgtcctgccagcgttctacactttggtgttcgacggcaaagtcaaaagctgctttggcgtaggggcgagctaccgtaataaattcagacatcagcccctccctccttacagttcagcgacaagtttatccacgatgtcgctgttagcagcttcatccacggaacgttcgatgatcttctcggcgccagcaacagccaggatagcaacttgcttacgcagctcttcacgggcacgtttacgctcggcttcaatttccgcctgcgcctgggccacgattttagtacgttcctgttctgcctcagctttcgcttcgtccagaatctggctgcggcgtttgttcgcctgctcgatgattacctgggcttccgctttcgcttttttcagctggtcggtcgcgctggcctttgcaaggtcaaggtccttatgtgctcgttctgcggaagcaaggccgtcagcaatttctttttgacgtttttcgatggctgccattaatggcggccatacgtacttcatgcagaacagaacgaacaggacaaacgcgatggcctggccgaggattgttgcgttaagattcacagcacaatgcctctatttagttaacgttctgatattgctctttaaataaaagcaacgcttattacgcgacagcgaacatcacgtacagacccagacctacagcgatcatcgggatagcatccaccagacccataacgataaagaactgagtacgcagcagaggaatcagatcaggttgacgcgctgcgccttccaggaatttacccccgaggatgccgataccgatcgcagcaccgattgccgccagacccatcatcacagcggcagccatgtacagcagatccatattcaggttttccatgacagtctccagtttgtttcagttaaaacgtagtagtgttggtaaattaatgttcttcagacgccatgctcagatagacgatcgtcagaaccatgaagatgaaggcttgcagcgtaatgatcaggatgtggaaaatggcccacggcacattcaggatccactgactccaccacggcaacagaccagcaatcagaatgaaaatcagctcaccggcatacatgttaccgaacagtcgcaaaccgagactaactggtttggacagcaggcttaccccttcaaggattaagttgacaggaatgaacgcccagtgattgaacggctgcagcgtcaactctttcgtgaagccgccgatgcctttcattttgatgctgtagaacagaatcaggataaatacgcccagtgccatagacagcgttacgttcacgtccgcagacggaaccacacgcagtgcaggcagacccagtacatgttcagcaatgtacggcagcaggtcgataggcagtaaatccatcaggttcatcaggaatacccagacgaagatcgtcagggccagcggagcaatcagcttgcttttgccatggtacatgtctttcacgctaccattaacaaagccgatcaccagctcaatcgcggtctgaaacttacctggcacaccgctggtcgcctttttggctacgctacggaataaaaccaggaacaacagacccagcaccacgctgaagaacatggagtcaatattgattgtccagaaggtggctggggggttttgtggatccaccaggctgaatgtacgcaggtccagctgaaggttattcaggtggtgtcctatgtaatcctgcggcgtcatattttcactagccatgatgccttttaccctttgttgttaattacagccggtgccagtatctgaaccaccagcaccaaaacccacgtaacgatcagcggcaagaataccgcctttaaaaccgccaacgccaccaccagtaacaccaacatcgccagaactttgaaagcttcgccaaatgcgaatgtccaggccacccggcctttcgctggtgtatgcgcctggtgacgccaggcaaatatcataaacaaaacgttaggcagaaagactgccaggcccccgcttattgcagagacgccccagaaggggtctttgaggctgaacagcaatccacttgctatcaccaccagtaactgaacgagcagaagcttccgagcaacgtttcgactcacgaggctcacagacatcacgtttttcactcctgctcccttcgaggtatgccgcgtgtcgtataaaactttctttaaggcttagagtcaagcatcaaaaagcggtcaaattatacggtgcgcccccgtgatttcaaacaataagtagccaaaaggtgaataaatgtttaaatatttttccagtgcatacaattgcgacttttctgctaaccctgttcgatcatgaaaaactgtaaataacgcgtaaacactggtgataaagcgtgcttcagatcacatattgcgcatgttcgcgcacagcatatttatttacttggcaaatgatgcctttgcaagtttatgatatttcagtctaaaaacagatactgttttaataaatgacatttacacaacaaaaaccacccattgacatttttaataatgttttaacagccaatgatggttcttagcgccgatttttagcagactgatattttcactaatgacttattttctgcttaccaaaaaaagccacgttatcttgttgatgcaaaagagtgaacgtggcgttaaatgtaaccagttatatcagtagaaaacctggttgttgttaacagtctaaccggtcaattttttatgatttttttgataaaaattaaattttatttgctttaatcaccaccagatgacgttcgccatccagggctggaacctgaagtttaaccacactttcgacctgatattcttcgggcaacaaagcgatttcatcttccggcatttgccctttcagcgcgtagaaacggccttgctcaccaggaagatggtggcaccagctcaccatatcgttcagagaggcaaaagcgcggctaattacgccatcaaatggcggctcactaggaaactcttctaccctgctctgtactggttcaatattctccagtttaagctcatgttgcacctgacgaaggaaacgcacgcgtttaccaaggctatccaacagagtgaaatgggcttcaggacgcacgatagagagtggaatgcctggcagtcctggtccggtgccgacatcgataaaccgttcaccttgcagatacggtgccaccacaatgctatcgagaatatggcgtaccagcatctcattaggatcgcggacgctagtcaggttgtacgctttgttccatttatgcagcatattcacgtaggcaataagctggtttttctggtgatcggtaaggctaatacctgcgtctttcagcagtaaggagagtttgttgagcacggtgattacctgttcttgatgcgttgcctggtaagcgggtgcttaccaggcatttttaatgcgttatgcgctacgacgcagcataccctgttttttcagccacaccagcagaatggagatggccgcaggcgtgacgccagaaatacggctagcttggccgatagaggctggtttgtgatcgttaagtttggcgatcacttcgttagaaagaccggatacctggcggtaatccagtgtcgcgggtagcagggtgttctcgttacgcagctgcttttcgatctcatcttgctggcgcgcgatataaccttcgtatttaacctgaatctcaacctgttccgccgcctgttcgtctgtcaacgcaggggcaaacggcgtcagcgtggttaatttttcataagtcatttccggacgacgcagcagatcttcaccactggcttcacgggaaagcggcgcagtcaggtgagcattcacttcggctgcagcttccgcgctcggggttacccaggtgcttttcagacgctgacgctcacgctcgatattctcaagtttctcgttaaagcgcgcccaacgttcgtcatccaccaggcccagttcacgaccgatttcagtcaaacgcagatccgcattatcttcgcgtagcatcagacgatattctgcgcggctagtaaacatacgatacggttctttggttcctaaagtgcacaggtcatcaactagtacgccgagatacgcctgagaacgtgccggagcccaaccttctttgtcagcagacagacgggcagcgttaagaccggccagcaaaccttgcgcagcggcttcttcgtaaccggtagtgccgttaatctgaccagcaaagaacagcccctggataaacttgctctccagcgtcggtttcaggtcgcgaggatcgaagaagtcatactcaatggcataacccggacgcacgatcttcgcgttttccatcccctgcatagagcggacgatttgcatctgcacatcgaacggcaggctggtggagataccgttcggataaatttcattagaggtcagtccttccggttcaaggaagatctgatgctgatttctgtcggcgaagcgcatgactttgtcttcgatgctcgggcagtagcgtgggccgacaccttcgatcacccctgcgtacattgggctacgatcgaggttactgcggatcacatcatgggttttctcgttggtatgagtgatataacacggcacctgctggggatgctgggacgcattgcccataaagctgaataccggcattgggttatcgccatgctgttgcgccagtacgctaaagtcgatggttcgagcatcaatacgcggtggtgtcccggttttcagacgaccaacgcgcagcggcagttcacgcaaacggcgagaaagcggaatggacggcggatcaccagcacggccaccgctgtaattatccagaccgatatgaattttaccgtcgaggaacgtcccaacggtgagcacgacggctttggcacggaacttcagtcccatttgggtaacagcaccgaccacgcgatcgttttcgacaataagatcttcaaccgcctgctggaagatcatcaggttcggttggttctccagcgccgtacgtaccgcctgacggtagagcacacgatccgcctgagctcgggtagcgcgaaccgccggtcctttgcttgcgtttagtatcctaaactggatacccgcctgatcgatcgctttcgccatcagaccgccgagtgcatccacttcttttaccagatgtcccttcccaataccgccgatcgccgggttgcagctcatctgccccagagtgtcgatattgtgtgtcaaaagcagagtctgttgacccatacgcgccgcggccatcgcggcctcggtgcctgcatgacccccgccaatgatgatgacgtcaaaaggatccggataaaacatggtgattgcctcgcataacgcggtatgaaaatggattgaagcccgggccgtggattctactcaactttgtcggcttgagaaagacctgggatcctgggtattaaaaagaagatctatttatttagagatctgttctattgtgatctcttattaggatcgcactgccctgtggataacaaggatccggcttttaagatcaacaacctggaaaggatcattaactgtgaatgatcggtgatcctggaccgtataagctgggatcagaatgaggggttatacacaactcaaaaactgaacaacagttgttctttggataactaccggttgatccaagcttcctgacagagttatccacagtagatcgcacgatctgtatacttatttgagtaaattaacccagcttcccagccattcttctgccggatcttccggaatgtcgtgatcaagaatgttgatcttcagtgtttcgcctgtctgttttgcaccggaatttttgagttctgcctcgagtttatcgatagccccacaaaaggtgtcatattcacgactgccaataccgattgcgccaaagcggactgcagaaagatcgggcttctgttcctgcaatgcttcatagaaaggagaaaggttgtccggaatatctccggcaccgtgggtggagctgataaccagccagatcccactggcaggtaaatcttctaacagcggaccgtgcagcgtttcggtggtaaaacccgcctcttccagcttttcagccaggtgttctgctacatattcggcaccgccgagggtgctgccgctgataagagtgatatctgccataaaccgccacctttattaagagtggcgtattgtacgctgtgaacgcgttgggatctacctgtggaaaagtatgggattaaaaaagccgatcagggcttgatggtacgcatgatcgggttttgcaggacgatcaatgtctcggtggactgaatttcatcaattgtttggatcttgttgataagtacatgctggagagcgtcgatgctacggcacatcacttttataaagatgctgtagtggccggttgtgtaataggcttcagtgacttcatcaaggctttccagctttgccagcgcggaagggtagtctttggcgctctttaatataatgccgataaagcagcctacgtcataaccgagctgcttcgggctgacatcaatacgcgccccggtaatgatccccgcctgcttcattttctctactcgaacgtgaatcgtccccggactgacgccaaattgtttcgccagttcggcgtaagcggtgcgcgcattgcccattaatgcttccaggatgccacggtccagattgtcgatcagataattttccataggattttcttatgcggattgatgattcattctattttagccttcttttttaatgaatcaaaagtgagttaggctttttattgaatgattattgcatgtgtgtcggtttttgttgcttaatcataagcaacaggacgcaggagtataaaaaatgaaaaccgcttacattgccaaacaacgtcaaattagcttcgtgaaatctcacttttctcgtcaactggaagaacgtctggggctgatcgaagtccaggcgccgattcttagccgtgtgggggatggcacgcaggataacttgagcggctgtgaaaaagcggtgcaggtaaaagtgaaagctctgcctgatgcccagttcgaagtggttcatagtctggcgaagtggaaacgtcagaccttagggcaacacgacttcagcgcgggcgaagggctgtacacgcacatgaaagcccttcgccccgatgaagaccgtctttctccgttgcacagcgtctatgttgaccagtgggactgggaacgcgtaatgggcgacggtgagcgtcaattcagcactctgaaaagcacggtagaggcgatctgggcgggaattaaagcaaccgaagctgcggttagcgaagagtttggcctggcaccgttcctgccggatcagatccacttcgtacacagccaggagttactgtctcgttatccggatcttgatgccaaagggcgtgagcgggcgatagcgaaagatcttggcgcggtattccttgtcgggattggcggcaagctgagcgatggtcatcgccacgacgtgcgcgcaccggattatgatgactggagcaccccgagtgagctgggccatgcgggtctgaacggcgatattctggtgtggaacccggtactggaagatgcgtttgagctttcctccatggggatccgtgtagatgccgacacgctgaagcatcaactggcgctgaccggtgacgaagatcgcctggagctggagtggcatcaggcgctgctgcgcggtgaaatgccgcagaccatcggcggcggtatcggccagtctcgtttgactatgctgctgctgcaactgccgcatatcggccaggttcagtgtggagtatggccagctgctgttcgcgagagcgtcccttctctgctgtaataatttatcgccgccagcgtctgagcaggcggcttcgcatcccggtatcaaagcgccagatatgatcgaaaatgcgcatgatgccgggtttgccgtgtgcgctcatcgccacggcatgaaagcgatgctgatgtacccgctgcagctctttcactttactcgtcacgtcgtcaggcaaccgctgagcgataaaatcagaaatcaccaccgcatcggcatcaaaccattccctgctttgcaagcgttccataatggcgcgaaaacaactggcaagatcggtgccgccacgaaactgctggcttaaaaaacggattgcttgttcgatgccttgtgggccactaagctcataacggacgatctcggtggaaaatagcataatatagcagcgccggttttctgcgagagcaatgcgcatcaaggccaggcagaacgctttcgcacactgttcattaaagccgcccatactgccggaagtatccacacagacaataaacggcccgcgcggctgttcatcgtaatctttatgtaccaccggacgttcgatcactttttcacgccagctctcaccgtgcaggcgataggtgagcaactgtttttccaccagccgacggtaaaactcatactccagttccgttatccctagtgtcgccagttctggcggcaggagacgtaaaatatcatcgctttgttgcagaccatcaacctgctcaggaaccgtcgccggttcgcgcaccatggtgcggaaggtttccatctgcgcatcgttgcgcggtatacttttggcttcccgagaacgccccagctgctctgccaggcgtttcagttccggctgttcgttaagaaattcaccgtatttcacaatcaactgatagtcgccacgtttaagctgaccggcgctcatatcccacagacgaccagctgcagtattgttatctgcgagaatcggttcaagttgtccgctcagcgtcatgcgttcctgaacttcactcaacagttgttcgcgttcttcttctaatagctgttgatttaacgtcgttgcttgcacgatcagacttaaacgccaacgctggagaaaaagcgtgtgtaacgcactagtgatcgtgctgttagcatcaaccaactgtcgggcttgttctgcccatggagaattcagacgatgcagtaagtccaggatctgtggtagctgcacaataaactgtggcgtggagaggagctggctttgctgatagcacatcacctcttcggtgagttccggcgggactcgggcatctttcagccgactgcgcagcgcttcacgccagcggggaacatcatcagtgattgccgccttcaggcgtgggaatttttcaaagaagaccgccagctgcggactggccagcagtgcgatgatcatctcttcgatcaatccctcttcgctgacggccagcatcacattaagcgtatccagcgttagcattgttgtgcctggcgaatctgtgcaccgacatcctgtaggctggcttcaatgcgacctaaccagtcgccagggataaacagacatttttgctgttcgctgaataaagcgtgttgcttgcgccagtcgctttcaagctcttccagttgttgttttatttcaccaggcagaccttcagcgctactaccgggaagtgccagcgtactgccttgtaaacttacatcgcgaacgacaagatgttgggcgctatcaacttccagattcagtttctgggcaaagccgataccgttcagtttaccgcgaatttcaccacctttgctcagccactgttccagcgcgctacgctcaaaggagatatgaaccacttccatatcatgcagttttaacggtttttgcagcagtagagtcagagtggaagcagtaacgttaacaggaagttgatactgctgacgacggctgaaaatgccgcccagacgaattaccgttaaggctgttttatcgctttgttgctgctggagttgcaggtgacgttgcacaatcgcgccaaggcgagtcaacatcccttgctgttgccaggcgtgaccggtcatcaatacatcaatttgttgttgtatcaaattcaggctttgcgcgtcataccacaggcaatctttcagcaaaatgagatctaccggggcaacagcactgcgaccgctaaaaaaggcgctggcctgcaataatcggatcgcttttttccagcgacgatcgctgacataaggcgcatccggtaatttatccagttgctggcgcagcataaaaatcagctcaaatacatgatcgggcagcgtaatttcaccaatctctttctgccagcgttcatattcttcatctgtgacctgcaaggcatcaggaaccggattgtcgttttcatcctgttgactggtcagcatggagcggaaattcgctttatcctgcactttatctaaccacagacgaatcagcatgcggtcatataacgcttccagactgctgtctgcttccggcagctcgttggaggccgccaccagcagacgcatcgggattttttctacgtgtgcaccgttgcggaactggcgctcgttaatggcggtgagcaaggtattaagaattgccgggcccgctttccagatctcatccagaaagacaatttctgcttccggcaggtaaccgctggttaaacgttcatagcgcccttcatcttttagcgcctgaatagaaaggggaccaaaaacttcttccggcgtggagaagcgggtcatcagatattcaaacgcgcgggcattctgaaaggcgaattttaagcgccgggcgatcaaacttttggcaatacctggcgggccaaggaggaacacactttcaccacttaatgccgctaataaacacaagcggatggcgtggctacgttcataaagccccttttccaagctactgctcaggcgggaaattctttccgctaataaatgagggtgagccataatgaagtggcgtcctttcgtcaaaagttctgcgtaaattgcgagtatagacgtttcttgctggtggctaaaatagtctcaaagggggggtatttttctttgagccaggttaatgtggccgcatttaggagtacgattttgccgttaatcgtgcatactgtgcgcttttttgtgggccaagggactaagcacacatttcatatttcaacgaaagactagtctatgagcactgataataagcaaagtttgcccgcgattaccctcgcggcgattggagttgtctacggcgatattggtaccagcccgttatatacacttcgtgaatgtttgtccggccagtttggttttggcgttgaacgcgatgccgtgtttggctttttaagcctgatcttctggctgctaatctttgtggtttccattaaatatctcaccttcgtgatgcgggcagataacgccggtgagggggggatcctgacgttgatgagccttgccgggcgtaatacgagcgcgcgaaccacaagtatgctggtgattatggggctaatcggcggcagctttttctatggtgaagtcgtcataacacccgctattagcgtgatgagtgccattgaaggtctggaaatcgtcgccccgcagctggatacctggatagttcccctcagtattatcgttctcactttattatttatgattcaaaaacatggcacggctatggtcggtaagctgtttgcgccgatcatgctgacctggtttttgattctggcaggactggggttacgtagcattattgctaacccggaagtgctgcatgcgctgaatccaatgtgggcggtgcatttcttccttgaatacaaaacggtttcttttattgcattaggggcagtggtgttgagcattacgggggtcgaggcgctgtatgctgatatggggcactttggtaagttccctattcgcctggcgtggttcaccgtcgtattaccttccttgacccttaattacttcggtcagggagcgctgttgttaaagaacccggaagcgattaagaacccgttcttcctgttggcaccggactgggcgctgatcccgctgctgatcatcgccgcactggcgacggtaattgccagccaggcggttatctctggcgtcttcagtttgacgcgtcaggcggtacgtctgggatatttgagcccgatgcgcattattcacacctccgaaatggagagtgggcaaatctatattccgtttgtgaactggatgctctatgtcgcggtcgtgattgtgattgtcagctttgagcactccagcaacctggcggcggcgtacgggattgcggtgaccggaaccatggtgctgacgtctattctcagcactaccgtggcacgtcagaactggcactggaataagtattttgttgcgctgatcctgattgctttcctttgtgtcgatattccattgttcaccgctaacctcgataaactgctctccggcggctggttgccattgagcctcggtactgtgatgtttatcgtgatgaccacctggaagagcgagcgtttccgcttgctgcggcggatgcatgaacatggtaactctctggaagcgatgattgctagcctggagaaaagtccgcctgttcgcgtgcccgggaccgcggtgtatatgagccgtgcaatcaacgtcattccctttgcgctgatgcataaccttaaacataacaaggtattgcatgagcgggtgattctgttaactctgcgcaccgaagacgctccatatgtccataacgtccgtcgggtacagattgaacaactgagccccactttctggcgcgtggtggcaagttatggttggcgagaaacgccaaacgtagaagaagttttccaccgctgcggtctggaaggattaagttgccggatgatggaaacctccttctttatgagccatgagagcttgatcctcggcaaacgcccgtggtatttgcgtctgcgcggcaagctgtacttgctgctgcaacgtaatgcgctgcgtgcaccagatcaatttgaaatcccgccaaacagggttatcgaactgggtactcaggtcgaaatctaacgccagacgcctcctttcttcataagggggcgtttttgttttcatggttaatcaccatgtaaaacgtttcgaggttgatcacatttccgtaacgtcacgatggttttcccaactcagtcaggattaaactgtgggtcagcgaaacgtttcgctgatggagaaaaaaatgaaaaaaggcaccgttcttaattctgatattagtagcgtgatctcccgtctgggacataccgatacgctggtggtgtgtgatgctggtttacccatccccaaaagtacaacgcgtatcgatatggcattaacccagggtgtaccttcttttatgcaggtgctgggcgtcgtcacaaatgaaatgcaggtcgaggcggccattatcgcggaagagatcaaacaccataatccgcaactccacgaaacgttgctcactcaccttgagcagctgcaaaaacaccagggaaataccattgaaattcgttacaccacgcatgaacaattcaaacaacaaaccgcagaaagtcaggcggtaattcgcagcggagaatgttctccgtatgcgaatatcattctctgtgctggcgtgacgttctgaggccgtcatggaagcattacttcagcttaaaggcatcgataaagccttcccgggcgtaaaagccctcagcggcgcagcgttaaatgtctatccgggccgcgtgatggcgctggtgggcgaaaacggcgcgggtaaatccaccatgatgaaagtgcttactggcatctatactcgcgatgccggtacgcttttatggctggggaaagaaacgacatttaccgggccaaaatcttcccaggaagccgggattgggattatccatcaggaactgaacctgatcccgcagttgaccattgccgaaaacattttcctcggtcgtgagtttgttaatcgctttggcaaaattgactggaaaaccatgtatgccgaagcggataaattgctggctaaacttaacctgcgctttaaaagcgacaagctggtgggcgatctttccatcggtgaccagcaaatggttgaaatcgccaaagtgctgagctttgagagcaaagtcatcattatggatgaaccgaccgatgcgctgaccgataccgaaaccgaatccctgttccgcgtcatccgcgagctgaaaagccaaggccgcggtattgtctatatctcccaccgcatgaaagaaatcttcgagatttgcgatgacgttaccgtttttcgtgatgggcaatttattgctgagcgcgaagtggcaagtctgaccgaagatagcctgattgagatgatggtgggtcgcaagctggaagatcaatatccgcacctggacaaagcgccgggagatatccgcctgaaagtcgataatctctgcggacctggcgttaacgatgtctcttttactttacgcaaaggcgaaattcttggcgtctctggtttgatgggcgcaggtcgtaccgaactgatgaaagtgctctacggcgcactaccgcgcaccagcggttacgtcaccctggatgggcatgaagtcgttacccgtagtccgcaggatggcctggcaaacggcattgtgtatatctccgaagaccgtaaacgtgacggtttagtgttgggcatgagtgtaaaagagaacatgagcctgacagcgctgcgctacttcagccgcgctggcggcagtttgaagcatgccgatgaacagcaggctgtgagtgatttcattcgtctgtttaatgtgaaaactccgagcatggaacaggcaattggtctgctttccggtggcaatcagcaaaaagtggcgattgcccgcggtctgatgacacgccccaaagtgttgatccttgatgaacctacccgtggcgtagatgtcggcgcgaaaaaagagatctatcaactgattaaccagttcaaagccgatggcttgagcatcattctggtgagtagcgagatgccagaagtattaggcatgagcgatcgcatcatcgtcatgcatgaagggcatctcagcggggaatttactcgtgagcaggccacccaggaagtgttaatggctgccgctgtgggcaagcttaatcgcgtgaatcaggagtaaaaaaatgacaacccagactgtctctggtcgccgttatttcacgaaagcgtggctgatggagcagaaaagccttatcgctctgctggtgctgatcgcgattgtcagcacgttaagcccgaactttttcaccatcaataacttattcaatattctccagcaaaccagtgtgaacgccattatggcggtcgggatgacgctggtgatcctgacgagcggcatcgacttaagcgtaggttctctgttggcgctgaccggcgcagttgctgcatctatcgtcggcattgaagtcaatgcgctggtggctgtcgctgctgctctcgcgttaggtgccgcaattggtgcggtaaccggggtgattgtagcgaaaggtcgcgtccaggcgtttatcgctacgctggttatgatgcttttactgcgcggcgtgaccatggtttataccaacggtagcccagtgaataccggctttactgagaacgccgatctgtttggctggtttggtattggtcgtccgctgggcgtaccgacgccagtctggatcatggggattgtcttcctcgcggcctggtacatgctgcatcacacgcgtctggggcgttacatctacgcgctgggcggcaacgaagcggcaacgcgtctttctggtatcaacgtcaataaaatcaaaatcatcgtctattctctttgtggtctgctggcaagcctggccgggatcattgaagtggcgcgtctctcctccgcacaacccacggcggggactggctatgagctggatgctattgctgcggtggttctgggcggtacgagtctggcgggcggaaaaggtcgcattgttgggacgttgatcggcgcattaattcttggcttccttaataatggattgaatttgttaggtgtttcctcctattaccagatgatcgtcaaagcggtggtgattttgctggcggtgctggtagacaacaaaaagcagtaataacgactacaggacatcttgaatatgaacatgaaaaaactggctaccctggtttccgctgttgcgctaagcgccaccgtcagtgcgaatgcgatggcaaaagacaccatcgcgctggtggtctccacgcttaacaacccgttctttgtaagcctgaaagatggcgcgcagaaagaggcggataaacttggctataacctggtggtgctggactcccagaacaacccggcgaaagagctggcgaacgtgcaggacttaaccgttcgcggcacaaaaattctgctgattaacccgaccgactccgacgcagtgggtaatgctgtgaagatggctaaccaggcgaacatcccggttatcactcttgaccgccaggcaacgaaaggtgaagtggtgagccacattgcttctgataacgtactgggcggcaaaatcgctggtgattacatcgcgaagaaagcgggtgaaggtgccaaagttatcgagctgcaaggcattgctggtacatccgcagcccgtgaacgtggcgaaggcttccagcaggccgttgctgctcacaagtttaatgttcttgccagccagccagcagattttgatcgcattaaaggtttgaacgtaatgcagaacctgttgaccgctcatccggatgttcaggctgtattcgcgcagaatgatgaaatggcgctgggcgcgctgcgcgcactgcaaactgccggtaaaagcgatgtgatggtcgtcggatttgacggtacaccggatggcgaaaaagcggtgaatgatggcaaactagcagcgactatcgctcagctacccgatcagattggcgcgaaaggcgtcgaaaccgcagataaagtgctgaaaggcgagaaagttcaggctaagtatccggttgatctgaaactggttgttaagcagtaattttaatcaggttgtatgacctgatggtgacataaatacgtcatcgacagatgaacgtgtaatataaagaaaagcagggcacgcgccaccctaacacggtggcgcattttatggacatcccgaatatgcaaaacgcaggcagcctcgttgttcttggcagcattaatgctgaccacattcttaatcttcaatcttttcctactccaggcgaaaccgtaaccggtaaccactatcaggttgcatttggcggcaaaggcgcgaatcaggctgtggctgctgggcgtagcggtgcgaatatcgcgtttattgcctgtacgggtgatgacagcattggtgagagcgttcgccagcagctcgccactgataacattgatattactccggtcagcgtgatcaaaggcgaaagtacaggtgtggcgctgatttttgttaatggcgaaggtgagaatgtcatcggtattcatgccggcgctaatgctgccctttccccggcgctggtggaagcgcaacgtgagcgtattgccaacgcgagtgcattattaatgcagctggaaagtccactcgaaagtgtgatggcagcggcgaaaatcgcccatcaaaataagactatcgttgcgcttaacccggctccggctcgcgaacttcctgacgaactgctggcgctggtggacattattacgccaaacgaaacggaagcagaaaagctcaccggtattcgtgttgaaaatgatgaagatgcagcgaaggcggcgcaggtactgcatgaaaaaggtatccgtactgtactgattactttaggaagtcgtggtgtatgggctagcgtgaatggtgaaggtcagcgcgttcctggattccgggtgcaggctgtcgataccattgctgccggagatacctttaacggtgcgttaatcacggcattgctggaagaaaaaccattgccagaggcgattcgttttgcccatgctgccgctgcgattgccgtaacacgtaaaggcgcacaaccttccgtaccgtggcgtgaagagatcgacgcatttttagacaggcagaggtgacgcttggctacaatgaaagatgttgcccgcctggcgggcgtttctaccagtacagtttctcacgttatcaataaagatcgcttcgtcagtgaagcgattaccgccaaagttgaagcggcgattaaagaactcaattacgcgccaagtgctctggcgcgtagcctcaaactcaatcaaacacataccattggcatgttgatcactgccagtaccaatcctttctatagtgaactggtgcgtggcgttgaacgcagctgcttcgaacgcggttatagtctcgtcctttgcaataccgaaggcgatgaacagcggatgaatcgcaatctggaaacgctgatgcaaaaacgcgttgatggcttgctgttactgtgcaccgaaacgcatcaacctagccgtgaaatcatgcaacgttatccgacagtgcctactgtgatgatggactgggctccgttcgatggcgacagcgatcttattcaggataacagcttgctgggcggagacttagcaacgcaatatctgatcgataaaggtcatacccgtatcgcctgtattaccggcccgctggataaaactccggcgcgcctgcggttggaaggttatcgggcggcgatgaaacgtgcgggtctcaacattcctgatggctatgaagtcactggtgattttgaatttaacggcgggtttgacgctatgcgccaactgctaagtcatccgctgcgtcctcaggccgtctttaccggaaatgacgctatggctgttggcgtttaccaggcgttatatcaggcagagttacaggttccgcaggatatcgcggtgattggctatgacgatatcgaactggcaagctttatgacgccaccattaaccactatccaccaaccgaaagatgaactgggggagctggcgattgatgtactcatccatcggataacccagccgacccttcagcaacaacgattacaacttactccgattctgatggaacgcggtagcgcttaattactcgctttcacttggaacgcggttcggcttagatttacgctgtcttttgatcaaattattaccatcggttgttttcagaagcatgaacattgctgcactagcaacagtaataatgcccattgtgataaacgtatagtggaattgttcgacagtcgttgtgccttccattccttcataaacgcgaaggacggccgcacttacagcaacgcctaaactaatgctcagttgctgcgtgaccgccagaacactgttaccgctgctggcattgtcatcggtcagatcggcaagtgtgatggtattcatcgcggtaaactgcgtgctcatagccatccctaatataaacaacggcaagatcagcatccatatagccattgctggactttgcaaagagaactgagcgatcattagcccaataatcaccgtgatccccactaacgtatggcgatagcccagacgacgtaagacttgggtaaccatgctttttgcaataatggaacctaacgctgtcggtgccatcatacagccagcaataaacgcctgataaccaaatcctacctgtaacatcaatggcataaggaacggtacacagccggtccccagacgggttgcaatattgcctacgataccgatgctgaaagtgcgggttttaaataaatctaaactaattaatgggtttggcgtgcgtcgtgcatggagaatatagagaagcagtaacccgatgctggtgacaattaccgtcaaggcaatccagctggcgacaatcttttccccgaatagctctattccgctactgaagagaacaaggctgaggccaaacagcaaaaagccagtgatatcgaatctgcgtcgtgcggtggtgaaattgggcatatgtttgcgcgcgtaaagaaggcccgcaatacctatggggatattgattaaaaatatccagtgccaggttgcccaggtgaccagcacgccgccaagaacggggcctaaaattggccccaccagacccggcatggcgacaaaattcaatactggaagaagttcattacgaggataagcgcgcagtaaggccagccgagcaacaggcatcatcattgcgccgcctatcccctgaataacccggaagacaaccagctgtggtaggctattagaaagtgcgcaggccagagaacccaatgtgaacagactcacggcaagggtaaaaatgcgacgcgtaccgaagcgatcggctagccatccgcttaccggaataagcatcgccaccgtcagcgtataactgatgatggcactttgcatcgcgagaggagaacgattaaggctatgagcgattgcgggtaaggcggtattaagaatagtggcatcaagtgcctgcatgaagaaggccatcgccgcgatccacggcaaacccgccatactgcgcttctttttatcgctcattcaatgtcctgttatcgggttatcacttatcaggactgcgtagcagcgcctgacaagctttaaatgccgcgtcgccatcgctttggataatcgcatcgacaatcgcctgatgcagatccagctttatcactgtgtcgctggtaatactcgtgaagtaagtgtgataaacgctatggaataggctggcgaaactggtcaaaaacggattggcgctcatttcatagatatgctcatgccaggccatatcgacttcgatccagcgttcacggcgaaagttctcttttaatgccgccatttcggccattaacgtattgagatgcgctttctgttccgcggtgccaaccgttgctgccagtaggcaggcttgcggctccagacagatacgcataaccagaaagtgatcgatgacctgatgaaagttctcttctgtcatccaccaggtaagcaattcctgatcaagaaaattccagttgctttgtggcatgacccgagtaccaattcgcggtcgcggtaaaaccatcccttttgccgttaacgttttgaccgcttcgcgtaccgctgtacgactcactccaaattgctcgcccagctcaatctcaccgggcaaaatggtgccgggttcatattcaccttttaagatccgttgcgccagcttctcagccagaacatagctaaggtttttctgtgcagctaactgttgtgcgcttaaaggcattacttatcttcctttttctttttattcctccttagtatgccaccaggaagtgtgattacggttgcaaaaacggcaaattgcttgttttatggcacattaacggggcttttgctgaaaaaatgcgcggtcagaaaattattttaaatttcctcttgtcaggccggaataactccctataatgcgccaccactgacacggaacaacggcaaacacgccgccgggtcagcggggttctcctgagaactccggcagagaaagcaaaaataaatgcttgactctgtagcgggaaagcgtattatgcacaccccgcgccgctgagaaaaagcaaagcggcactgctctttaacaatttatcagacaatctgtgtgggcactcgaagatacggattcttaacgtcgcaagacgaaaaatgaataccaagtctcaagagtgaacacgtaattcattacgaagtttaattctttgagcatcaaacttttaaattgaagagtttgatcatggctcagattgaacgctggcggcaggcctaacacatgcaagtcgaacggtaacaggaaacagcttgctgtttcgctgacgagtggcggacgggtgagtaatgtctgggaaactgcctgatggagggggataactactggaaacggtagctaataccgcataacgtcgcaagaccaaagagggggaccttcgggcctcttgccatcagatgtgcccagatgggattagctagtaggtggggtaacggctcacctaggcgacgatccctagctggtctgagaggatgaccagccacactggaactgagacacggtccagactcctacgggaggcagcagtggggaatattgcacaatgggcgcaagcctgatgcagccatgccgcgtgtatgaagaaggccttcgggttgtaaagtactttcagcggggaggaagggagtaaagttaatacctttgctcattaacgttacccgcagaagaagcatcggctaactccgtgccagcagccgcggtaatacggagggtgcaagcgttaatcggaattactgggcgtaaagcgcacgcaggcggtttgttaagtcagatgtgaaatccccgggctcaacctgggaactgcatctgatactggcaagcttgagtctcgtagaggggggtagaattccaggtgtagcggtgaaatgcgtagagatctggaggaataccggtggcgaaggcggccccctggacgaagactgacgctcaggtgcgaaagcgtggggagcaaacaggattagataccctggtagtccacgccgtaaacgatgtcgacttggaggttgtgcccttgaggcgtggcttccggagctaacgcgttaagtcgaccgcctggggagtacggccgcaaggttaaaactcaaatgaattgacgggggcccgcacaagcggtggagcatgtggtttaattcgatgcaacgcgaagaaccttacctggtcttgacatccacggaagttttcagagatgagaatgtgccttcgggaaccgtgagacaggtgctgcatggctgtcgtcagctcgtgttgtgaaatgttgggttaagtcccgcaacgagcgcaacccttatcctttgttgccagcggtccggccgggaactcaaaggagactgccagtgataaactggaggaaggtggggatgacgtcaagtcatcatggcccttacgaccagggctacacacgtgctacaatggcgcatacaaagagaagcgacctcgcgagagcaagcggacctcataaagtgcgtcgtagtccggattggagtctgcaactcgactccatgaagtcggaatcgctagtaatcgtggatcagaatgccacggtgaatacgttcccgggccttgtacacaccgcccgtcacaccatgggagtgggttgcaaaagaagtaggtagcttaaccttcgggagggcgcttaccactttgtgattcatgactggggtgaagtcgtaacaaggtaaccgtaggggaacctgcggttggatcacctccttaccttaaagaagcgttctttgcagtgctcacacagattgtctgataggaagtgaaaagcaaggcgtcttgcgaagcagactgatacgtccccttcgtctagaggcccaggacaccgccctttcacggcggtaacaggggttcgaatcccctaggggacgccacttgctggtttgtgagtgaaagtcacctgccttaatatctcaaaactcatcttcgggtgatgtttgagatatttgctctttaaaaatctggatcaagctgaaaattgaaacactgaacaacgaaagttgttcgtgagtctctcaaattttcgcaacacgatgatgaatcgaaagaaacatcttcgggttgtgaggttaagcgactaagcgtacacggtggatgccctggcagtcagaggcgatgaaggacgtgctaatctgcgataagcgtcggtaaggtgatatgaaccgttataaccggcgatttccgaatggggaaacccagtgtgtttcgacacactatcattaactgaatccataggttaatgaggcgaaccgggggaactgaaacatctaagtaccccgaggaaaagaaatcaaccgagattcccccagtagcggcgagcgaacggggagcagcccagagcctgaatcagtatgtgtgttagtggaagcgtctggaaaggcgcgcgatacagggtgacagccccgtacacaaaaatgcacatattgtgagctcgatgagtagggcgggacacgtggtatcctgtctgaatatggggggaccatcctccaaggctaaatactcctgactgaccgatagtgaaccagtaccgtgagggaaaggcgaaaagaaccccggcgaggggagtgaaaaagaacctgaaaccgtgtacgtacaagcagtgggagcacgcttaggcgtgtgactgcgtaccttttgtataatgggtcagcgacttatattctgtagcaaggttaaccgaataggggagccgaagggaaaccgagtcttaactgggcgttaagttgcagggtatagacccgaaacccggtgatctagccatgggcaggttgaaggttgggtaacactaactggaggaccgaaccgactaatgttgaaaaattagcggatgacttgtggctgggggtgaaaggccaatcaaaccgggagatagctggttctccccgaaagctatttaggtagcgcctcgtgaattcatctccgggggtagagcactgtttcggcaagggggtcatcccgacttaccaacccgatgcaaactgcgaataccggagaatgttatcacgggagacacacggcgggtgctaacgtccgtcgtgaagagggaaacaacccagaccgccagctaaggtcccaaagtcatggttaagtgggaaacgatgtgggaaggcccagacagccaggatgttggcttagaagcagccatcatttaaagaaagcgtaatagctcactggtcgagtcggcctgcgcggaagatgtaacggggctaaaccatgcaccgaagctgcggcagcgacgcttatgcgttgttgggtaggggagcgttctgtaagcctgcgaaggtgtgctgtgaggcatgctggaggtatcagaagtgcgaatgctgacataagtaacgataaagcgggtgaaaagcccgctcgccggaagaccaagggttcctgtccaacgttaatcggggcagggtgagtcgacccctaaggcgaggccgaaaggcgtagtcgatgggaaacaggttaatattcctgtacttggtgttactgcgaaggggggacggagaaggctatgttggccgggcgacggttgtcccggtttaagcgtgtaggctggttttccaggcaaatccggaaaatcaaggctgaggcgtgatgacgaggcactacggtgctgaagcaacaaatgccctgcttccaggaaaagcctctaagcatcaggtaacatcaaatcgtaccccaaaccgacacaggtggtcaggtagagaataccaaggcgcttgagagaactcgggtgaaggaactaggcaaaatggtgccgtaacttcgggagaaggcacgctgatatgtaggtgaagcgacttgctcgtggagctgaaatcagtcgaagataccagctggctgcaactgtttattaaaaacacagcactgtgcaaacacgaaagtggacgtatacggtgtgacgcctgcccggtgccggaaggttaattgatggggtcagcgcaagcgaagctcttgatcgaagccccggtaaacggcggccgtaactataacggtcctaaggtagcgaaattccttgtcgggtaagttccgacctgcacgaatggcgtaatgatggccaggctgtctccacccgagactcagtgaaattgaactcgctgtgaagatgcagtgtacccgcggcaagacggaaagaccccgtgaacctttactatagcttgacactgaacattgagccttgatgtgtaggataggtgggaggctttgaagtgtggacgccagtctgcatggagccgaccttgaaataccaccctttaatgtttgatgttctaacgtggacccgtgatccgggttgcggacagtgtctggtgggtagtttgactggggcggtctcctcctaaagagtaacggaggagcacgaaggttggctaatcctggtcggacatcaggaggttagtgcaatggcataagccagcttgactgcgagcgtgacggcgcgagcaggtgcgaaagcaggtcatagtgatccggtggttctgaatggaagggccatcgctcaacggataaaaggtactccggggataacaggctgataccgcccaagagttcatatcgacggcggtgtttggcacctcgatgtcggctcatcacatcctggagctgaagtaggtcccaagggtatggctgttcgccatttaaagtggtacgcgagctgggtttagaacgtcgtgagacagttcggtccctatctgccgtgggcgctggagaactgaggggggctgctcctagtacgagaggaccggagtggacgcatcactggtgttcgggttgtcatgccaatggcactgcccggtagctaaatgcggaagagataagtgctgaaagcatctaagcacgaaacttgccccgagatgagttctccctgactccttgagagtcctgaaggaacgttgaagacgacgacgttgataggccgggtgtgtaagcgcagcgatgcgttgagctaaccggtactaatgaaccgtgaggcttaaccttacaacgccgaagatgttttggcggatgagagaagattttcagcctgatacagattaaatcagaacgcagaagcggtctgatgaaacagaatttgcctggcggccgtagcgcggtggtcccacctgaccccatgccgaactcagaagtgaaacgccgtagcgccgatggtagtgtggggtctccccatgcgagagtagggaactgccaggcatcaaattaagcagtaagccggtcataaaaccggtggttgtaaaagaattcggtggagcggtagttcagtcggttagaatacctgcctgtcacgcagggggtcgcgggttcgagtcccgtccgttccgccaccctaattaggggcgtagttcaattggtagagcaccggtctccaaaaccgggtgttgggagttcgagtctctccgcccctgccagaaatcatccttagcgaaagctaaggattttttttatctgaaataaccctctccgaagtaaatccttctaccggcatccttgccagccattcatattaatacacttcatccagcacgttaattttcaaaagatcgcgaatcaacgcatttttatcgctattttgcagccatatggcataaagcggccgactaagtgttgtgctatcgacaacggtatgcaggccgccttttttacgcgcccagctgacgggtagccaggtgcaaccattaagcatcgcaatctgttgctgtgccagttcagcagaactggttgtcagaatgggcacttcgtcagcaccgatcaaacctgcctcatgctgttgaaaatctggcccccactcaagtcgcagataattaagatctccctttagtttactaggggcactggtataaagcgctaaagtgaaatatcccagcaactgactactaaattcgtccattttgggcgcttcagtggtaataagaagatcaagctggcgttcatgcagctgttttaccagagactgccgttgggcaattcgcgcttcgaactgtaagcctgtatgggcatcctgattttgatacaagcgtcccagccactgattaagcatacattcccacaagctggcgctggcaccgatagaaaactcgttatgtcgactggtatgcgccacctccttacgggcggcctgccaggtgctcatgagcgtttctgcataaggcagtagtttttcaccggcagcggttaaacggatattgtttctgtggcgggtgaaaaggttcacacccagttgattttccagttgtctgattcgaaagctcactgcactctgggtcagatagaggctttcagccgctcgaccaaagtgacgcgttcggctaacttccaggaaagtttttaacaattccgtatccacagtgctctccgcaaaattatttgtcgttatgatttaaatgttttgttttacactctgtcaagcgtaactaatactccgcgccataactagctcggtcaaagaattaggagcgtgcaggatggcggaaagctttacgacgactaatcgatatttcgacaataaacattatccacgtggattctctcgtcatggtgatttcaccatcaaagaggcacaactgcttgagcgtcatggttatgccttcaatgagttggatcttggcaaacgcgagccggttaccgaggaagagaaactcttcgtagcagtatgccgtggcgaacgtgagccagtgacagaagcagaacgcgtgtggtccaagtatatgacgcgtattaagcgtccaaaacgttttcacaccctttccggcggtaaaccgcaggttgaaggtgctgaagactacaccgattctgacgattaataaaaagggcgaaatgccctttttttatgtcagtagtttctgcagatggatgagcaaacggtcaatcgctcgatagctaactgcctcctgcaaatgctgacgtgtgataatgtcagactgatcaatatcagcaatggttcgtgcaactttcaataaccgctgccaggcacgaatgcttaaccccagatggatcagtgttccttccaaccacatcgcatcttcgctctcaagtttgcagaattggcgtatttccggactatccagccaggcattcagtttattctgccgcttaaattggcgctctctggcggccattacgcgttgtttaacggtggcgctgctttctcccggcactaccgttttactcaaaatgccggggggtggtaatgggatctccagactgagatcgaagcggtcgagaaagggcccgctgagccggttgagataacgtaatgtctgttctggcgtgcagcggttatggtttccctgataatgtccggtagggctgggattcatcgccgcaacaagctggaaacgggctggataggttatttttgctcgtgtgcgactaagatggatctgcccggattcaatcggctctcgcaaggcatccagtgtacgccgttcaaattcaggtagctcatcaagaaaaagcacgccgttatgcgccaggctaatttcaccgggccctggaattgcgccaccgcctaccatcgcagttaagcttgcactgtgatgaggactgcggaacgggcgctgccgccattgtttttgtacactttcagcatttaccagacttaatatcgcagcactctccagtgcctcttcattgcttaaatctggcaacaggccattaatacggctggcgagcattgttttacctgttcccggcggcccaatcagtaaaaggttgtgcccgccagcagcggtaatttccagtcctcgctttccttgttcctgaccgataacatcactgagatcatgttgtagcgcccgggatactgcatcagttggtttcgggcgttcgagagcgtgcttaccttccagaaacgcacagacagcttgcagatgatcggctatcaggcatccttcaccgttaattagccccacttcatcttcgttatctttcgcgacgataatttttctgccgctcttaatagcttcagttgcactggagattgcgccgggaacgccacgcagagcgcctgtaagcgccagttctccgactaattcatattcatctaacttattggctgtaagctgttcactggccgccagcaacgcaatggcgataggtaaatcatatcgtcccccttcttttggcagatcagctggagccaggttgatggtgatttttttcgccggatattcatatccgctattgataatggcgctgcgcacgcgatcgcgagcttcttttaccgttgtttctggtaagcccaccatcgttaagccgggtagacctttactgatatgtacctcaacagtgatcgggggcgcatttactcccagggctgcgcgggtatgaacaatactcagactcataagccctccttgagtcaccattatgtgcataagatatcgctgctgtagcccgctaattcgtgaattttagtggctgattcctgtttatttgtgcaagtgaagttgagttgttctggcggtggaatgatgctcgcaaaaatgcagcggacaaaggatgaactacgaggaagggaacaacattcatactgaaattgaatttttttcactcactattttatttttaaaaaacaacaatttatattgaaattattaaacgcatcataaaaatcggccaaaaaatatcttgtactatttacaaaacctatggtaactctttaggcattccttcgaacaagatgcaagaaaagacaaaatgacagcccttctacgagtgattagcctggtcgtgattagcgtggtggtgattattatcccaccgtgcggggctgcacttggacgaggaaaggcttaaagatcaagccttaacgaactaagacccccgcaccgaaaggtccgggggttttttttgaccttaaaaacataaccgaggagcagacaatgaataacagcacaaaattctgtttctcaagattcaggacggggaactaactatgaatggcgcacagtgggtggtacatgcgttgcgggcacagggtgtgaacaccgttttcggttatccgggtggcgcaattatgccggtttacgatgcattgtatgacggcggcgtggagcacttgctatgccgacatgagcagggtgcggcaatggcggctatcggttatgctcgtgctaccggcaaaactggcgtatgtatcgccacgtctggtccgggcgcaaccaacctgataaccgggcttgcggacgcactgttagattccatccctgttgttgccatcaccggtcaagtgtccgcaccgtttatcggcactgacgcatttcaggaagtggatgtcctgggattgtcgttagcctgtaccaagcacagctttctggtgcagtcgctggaagagttgccgcgcatcatggctgaagcattcgacgttgcctgctcaggtcgtcctggtccggttctggtcgatatcccaaaagatatccagttagccagcggtgacctggaaccgtggttcaccaccgttgaaaacgaagtgactttcccacatgccgaagttgagcaagcgcgccagatgctggcaaaagcgcaaaaaccgatgctgtacgttggcggtggcgtgggtatggcgcaggcagttccggctttgcgtgaatttctcgctgccacaaaaatgcctgccacctgtacgctgaaagggctgggcgcagtagaagcagattatccgtactatctgggcatgctggggatgcacggcaccaaagcggcaaacttcgcggtgcaggagtgtgacctgctgatcgccgtgggcgcacgttttgatgaccgggtgaccggcaaactgaacaccttcgcgccacacgccagtgttatccatatggatatcgacccggcagaaatgaacaagctgcgtcaggcacatgtggcattacaaggtgatttaaatgctctgttaccagcattacagcagccgttaaatcaatgactggcagcaacactgcgcgcagctgcgtgatgaacattcctggcgttacgaccatcccggtgacgctatctacgcgccgttgttgttaaaacaactgtcggatcgtaaacctgcggattgcgtcgtgaccacagatgtggggcagcaccagatgtgggctgcgcagcacatcgcccacactcgcccggaaaatttcatcacctccagcggtttaggtaccatgggttttggtttaccggcggcggttggcgcacaagtcgcgcgaccgaacgataccgttgtctgtatctccggtgacggctctttcatgatgaatgtgcaagagctgggcaccgtaaaacgcaagcagttaccgttgaaaatcgtcttactcgataaccaacggttagggatggttcgacaatggcagcaactgttttttcaggaacgatacagcgaaaccacccttactgataaccccgatttcctcatgttagccagcgccttcggcatccatggccaacacatcacccggaaagaccaggttgaagcggcactcgacaccatgctgaacagtgatgggccatacctgcttcatgtctcaatcgacgaacttgagaacgtctggccgctggtgccgcctggcgccagtaattcagaaatgttggagaaattatcatgatgcaacatcaggtcaatgtaagcgctcgcttcaatccagaaaccttagaacgtgttttacgcgtggtgcgtcatcgtggtttccacgtctgcagtatgaatatggccgccgccagcgatgcacaaaatataaatatcgaattgaccgttgccagcccacggagcgtcgacttactgtttagtcagttaaataaactggtggacgtcgcacacgttgccatctgccagagcacaaccacaagtcaacaaatccgcgcctgagcgcaaaaggaatataaaaatgaccacgaagaaagctgattacatttggttcaatggggagatggttcgctgggaagacgcgaaggtgcatgtgatgagccacgcgctgcactatggcactagcgtttttgaaggcatccgttgctacgacagccacaaaggaccggttgtattccgccatcgtgagcatatgcagcgtctgcatgactccgccaaaatctatcgcttcccggttagccagagcattgatgagctgatggaagcttgtcgtgacgtgatccgcaaaaacaatctcaccagcgcctatatccgtccgctgatcttcgtcggtgatgttggcatgggagtaaacccgccagcgggatacagtaccgacgtgattatcgctgctttcccgtggggagcgtatctgggcgcagaagcgctggagcaggggatcgatgcgatggtttcctcctggaaccgcgcagcaccaaacaccatcccgacggcggcaaaagccggtggtaactacctctcttccctgctggtgggtagcgaagcgcgccgccacggttatcaggaaggtatcgcgctggatgtgaacggttatatctctgaaggcgcaggcgaaaacctgtttgaagtgaaagatggtgtgctgttcaccccaccgttcacctcctccgcgctgccgggtattacccgtgatgccatcatcaaactggcgaaagagctgggaattgaagtacgtgagcaggtgctgagccgcgaatccctgtacctggcggatgaagtgtttatgtccggtacggcggcagaaatcacgccagtgcgcagcgtagacggtattcaggttggcgaaggccgttgtggcccggttaccaaacgcattcagcaagccttcttcggcctcttcactggcgaaaccgaagataaatggggctggttagatcaagttaatcaataaatacaaaaaatgggacggcacgcaccgtcccatttacgagacagacactgggagtaaataaagtatgcctaagtaccgttccgccaccaccactcatggtcgtaatatggcgggtgctcgtgcgctgtggcgcgccaccggaatgaccgacgccgatttcggtaagccgattatcgcggttgtgaacagcttcacccaatttgtaccgggtcacgtccatctgcgcgatctcggtaaactggtcgccgaacaaattgaagcggctggcggcgttgccaaagagttcaacaccattgcggtggatgatgggattgccatgggccacggggggatgctttatagtctgccatctcgcgaactgatcgctgattccgttgagtatatggtcaacgcccactgcgccgacgccatggtctgcatctctaactgcgacaaaatcaccccggggatgctgatggcttccctgcgcctgaatattccggtgatctttgtttccggcggcccgatggaggccgggaaaaccaaactttccgatcagatcatcaagctcgatctggttgatgcgatgatccagggcgcagacccgaaagtatctgactcccagagcgatcaggttgaacgttccgcgtgtccgacctgcggttcctgctccgggatgtttaccgctaacagtatgaactgcctgaccgaagcgctgggcctgagccagccgggcaacggcagcctgctggcaacccacgccgaccgtaagcagctgttccttaatgctggtaaacgcattgttgaattgaccaaacgttattacgagcaaaacgacgaaagtgcactgccgcgtaatatcgccagtaaggcggcgtttgaaaacgccatgacgctggatatcgcgatgggtggaagcactaacaccgtacttcacctgctggcggcggcgcaggaagcggaaatcgacttcaccatgagtgatatcgataagctttcccgcaaggttccacagctgtgtaaagttgcgccgagcacccagaaataccatatggaagatgttcaccgtgctggtggtgttatcggtattctcggcgaactggatcgcgcggggttactgaaccgtgatgtgaaaaacgtacttggcctgacgttgccgcaaacgctggaacaatacgacgttatgctgacccaggatgacgcggtaaaaaatatgttccgcgcaggtcctgcaggcattcgtaccacacaggcattcagccaagattgccgttgggatacgctggacgacgatcgcgccaatggctgtatccgcagcctggaacacgcctacagcaaagacggcggcctggcggtgctctacggtaactttgcggaaaacggctgcatcgtgaaaacggcaggcgtcgatgacagcatcctcaaattcaccggcccggcgaaagtgtacgaaagccaggacgatgcggtagaagcgattctcggcggtaaagttgtcgccggagatgtggtagtaattcgctatgaaggcccgaaaggcggtccggggatgcaggaaatgctctacccaaccagcttcctgaaaagtatgggtctcggcaaagcctgtgcgctgatcaccgacggtcgtttctctggtggcacctctggtctttccatcggccacgtcagtccggaagcggcaagcggcggcagcattggcctgattgaagatggtgacctgatcgctatcgacatcccgaaccgtggcattcagttacaggtaagcgatgccgaactggcggcgcgtcgtgaagcgcaggacgctcgaggtgacaaagcctggacgccgaaaaatcgtgaacgtcaggtctcctttgccctgcgtgcttatgccagcctggcaaccagcgccgacaaaggcgcggtgcgcgataaaagcaaactggggggttaataatggctgacagccaacccctgtccggtgctccggaaggtgccgaatatttaagagcagtgctgcgcgcgccggtttacgaggcggcgcaggttacgccgctacaaaaaatggaaaaactgagcagccgtcttgataacgtcattctggtgaagcgcgaagatcgccagccagtgcacagctttaagctgcgcggcgcatacgccatgatggcgggcctgacggaagaacagaaagcgcacggcgtgatcactgcttctgcgggtaaccacgcgcagggcgtcgcgttttcttctgcgcggttaggcgtgaaggccctgatcgttatgccaaccgccaccgccgacatcaaagtcgacgcggtgcgcggcttcggcggcgaagtgctgctccacggcgcgaactttgatgaagcgaaagccaaagcgatcgaactgagtcagcagcaggggttcacctgggtgccgccgttcgaccatccgatggtgattgccgggcaaggcacgctggcgctggaactgctccagcaggacgcccatctcgaccgcgtatttgtgccagtcggcggcggcggtctggctgctggcgtggcggtgctgatcaaacaactgatgccgcaaatcaaagtgatcgccgtagaagcggaagactccgcctgcctgaaagcagcgctggatgcgggtcatccggttgatctgccgcgcgtagggctatttgctgaaggcgtagcggtaaaacgcatcggtgacgaaaccttccgtttatgccaggagtatctcgacgacatcatcaccgtcgatagcgatgcgatctgtgcggcgatgaaggatttattcgaagatgtgcgcgcggtggcggaaccctctggcgcgctggcgctggcgggaatgaaaaaatatatcgccctgcacaacattcgcggcgaacggctggcgcatattctttccggtgccaacgtgaacttccacggcctgcgctacgtcagtgaacgctgcgaactgggcgaacagcgtgaagcgttgttggcggtgaccattccggaagaaaaaggcagcttcctcaaattctgccaactgcttggcgggcgtagcgtcaccgagttcaactaccgttttgccgatgccaaaaacgcctgcatctttgtcggtgtgcgcctgagccgcggcctcgaagagcgcaaagaaattttgcagatgctcaacgacggcggctacagcgtggttgatctctccgacgacgaaatggcgaagctacacgtgcgctatatggtcggcggacgtccaagccatccgttgcaggaacgcctctacagcttcgaattcccggaaagtccgggcgcgctgctgcgcttcctcaacacgctgggtacgtactggaacatttctttgttccactatcgcagccatggcaccgactacgggcgcgtactggcggcgttcgaacttggcgaccatgaaccggatttcgaaacccggctgaatgagctgggctacgattgccacgacgaaaccaataacccggcgttcaggttctttttggcgggttaaggaaaaatgcctgatagcgcttcgcttatcaggcctacccgcgcgacaacgtcatttgtggttcggcaaaatcttccagaatgcctcaattagcggctcatgtagccgctttttctgcgcacacacgcccagctcaaacggcgttttctcatcgctgcgctctaaaatcatcacgcggttacgcaccggttcggggctgttttccagcaccacttccggcaacaatgccacgccacagccgagtgccaccatgcttaccatcgcttcatgcccgccaaccgtggcgtaaatcatcgggttactgattttattgcgtcgaaaccacagttcaatgcggcggcgtaccggcccctgatcggccataataaacggcaccgtactccagtccggcttctctacgctcacctgattacgcaccgggcagggcagcgcgggggcaatcagcactactgccagattctccagcatgctaaacgccactgcgccgggcaaggtttccggtttacccgcaatcgccagatccgcttcaccagtgaccaccttttccatcgcatctgccgcatcaccagtagtaagtttaatctccacgctcgggtgttccgcgcggaagcgatccagaatcggcggcagatggctgtaggcagcggtcacgctgcagaagatatgtaattcgccagagaggctcggcccttgctgatcgatggtgtggcgcaactgctgatactgcaacagcgtttgctgggcgaaaacgcgcagctcttcgcccgcttcagtcagcgtcaccgtgcggttatcgcgcacaaacagcggctgaccgagatcttcttccaggcgctgaatctgccgactgagcgtggatgggctaacgtgcatcgcccgcgcgctgcggccaaaatggcggctttccgccagatgcaggaaggttttcagatcgcgtaaatccacagggacagccctcgatgttgacgttgcaaaaattgcaatgtgacgttgtgaatatatcaatttccgcaataaatttcctgtcatatagtgaattcaatctcgcaaacgcgaaccgaacaataagaagcacaacatcacgaggaatcaccatggctaactacttcaatacactgaatctgcgccagcagctggcacagctgggcaaatgtcgctttatgggccgcgatgaattcgccgatggcgcgagctaccttcagggtaaaaaagtagtcatcgtcggctgtggcgcacagggtctgaaccagggcctgaacatgcgtgattctggtctcgatatctcctacgctctgcgtaaagaagcgattgccgagaagcgcgcgtcctggcgtaaagcgaccgaaaatggttttaaagtgggtacttacgaagaactgatcccacaggcggatctggtgattaacctgacgccggacaagcagcactctgatgtagtgcgcaccgtacagccactgatgaaagacggcgcggcgctgggctacagccacggtttcaacatcgtcgaagtgggcgagcagatccgtaaagatatcaccgtagtgatggttgcgccgaaatgcccaggcaccgaagtgcgtgaagagtacaaacgtgggttcggcgtaccgacgctgattgccgttcacccggaaaacgatccgaaaggcgaaggcatggcgattgccaaagcctgggcggctgcaaccggtggtcaccgtgcgggtgtgctggaaagctccttcgttgcggaagtgaaatctgacctgatgggcgagcaaaccatcctgtgcggtatgttgcaggctggctctctgctgtgcttcgacaagctggtggaagaaggtaccgatccagcatacgcagaaaaactgattcagttcggttgggaaaccatcaccgaagcactgaaacagggcggcatcaccctgatgatggaccgtctctctaacccggcgaaactgcgtgcttatgcgctttctgaacagctgaaagagatcatggcacccctgttccagaaacatatggacgacatcatctccggcgaattctcttccggtatgatggcggactgggccaacgatgataagaaactgctgacctggcgtgaagagaccggcaaaaccgcgtttgaaaccgcgccgcagtatgaaggcaaaatcggcgagcaggagtacttcgataaaggcgtactgatgattgcgatggtgaaagcgggcgttgaactggcgttcgaaaccatggtcgattccggcatcattgaagagtctgcatattatgaaagtctgcacgagctgccgctgattgccaacaccatcgcccgtaagcgtctgtacgaaatgaacgtggttatctctgataccgctgagtacggtaactatctgttctcttacgcttgtgtgccgttgctgaaaccgtttatggcagagctgcaaccgggcgacctgggtaaagctattccggaaggcgcggtagataacgggcaactgcgtgatgtgaacgaagcgattcgcagccatgcgattgagcaggtaggtaagaaactgcgcggctatatgacagatatgaaacgtattgctgttgcgggttaagtgcgcgctgatgccctcaccccgaccctctcccacagggagagggagaaaacactcaaggccttctcctggagaaggccttgctattagttgcggtacagcaccttaatgatgtgatatccgaactgggtgtgcagcgggccggtcggctccagtaccggacaagagaaaaccactttatcgaacgccggaaccatctgaccctggcggaattcacctaaatcaccgccgcgtttgccacttgggcaaatggagtgtttcttcgccagcttgccgaaatcggccccgttcttaatctgctcgagaagatccagagccagtttctcttcttttacaaggatatgcagtgctgctgctgtttttgccatgatcgtgccttgagtgaataattgtcaggcggcgattttagcatgatccgcagatgctaacgtaattgtcagtcagggagtggctggtacatatatggcaaaagcccggaaaatccgggcttcgcaggtccctcaaggggagaaaacttagggcctctatgggctacaaagtcattatcggggatggttattttattgtcaatttatgaggcttatggcattgatactcttgatgaccgccctctgtatgtctgcaaccaactcatgtggcaaacattgattaagataccctctgtaagtccttgctctgtttaatctgtttcgactgacttgttgtaccaggtcggctttggcccaacgaatctgctgatcaaagaattgcaggtcattgataacattactggctatttcaacatgcattccacgttttaacttgtctggtcggctgtggttgataatggaacgacgatgcatgcgttgccattaatttttccgttgagcacgacaactaacctgttttttatcatttcaggaggaatgcggccatcgtaatacgtcgtgctgaacggtccattttggctaacaggatagttaccaaagttgcattccagtatttcaccaaccttagggctgaaattaatcgccacgagtaaacctctccttagtaaactctgaaaaagtaataacacaacgttacgacccgatattttctaagtctaatggattcacgatgaactccgatttcggtcttctctctctgatttaaacatccgcagccaaccggttagcggcttacacgcggtcacattcaaatgcgattctgctacaatcctccccccgttcgaagattgagcaatacacctatgcgtctaaaccccggccaacaacaagctgtcgaattcgttaccggcccctgcctggtgctggcgggcgcgggttccggtaaaactcgtgttatcaccaataaaatcgcccatctgatccgcggttgcggttatcaggcgcggcacattgcggcggtgacctttactaataaagcagcgcgcgagatgaaagagcgtgtagggcagacgctggggcgcaaagaggcgcgtgggctgatgatctccactttccatacgttggggctggatatcatcaaacgcgagtatgcggcgcttgggatgaaagcgaacttcagcttgtttgacgataccgatcagcttgctttgcttaaagagttgaccgaggggctgattgaagatgacaaagttctcctgcaacaactgattagcaccatctctaactggaagaatgatctcaaaacaccgtcccaggcggcagcaagtgcgattggcgagcgggaccgtatttttgcccattgttatgggctgtatgatgcacacctgaaagcctgtaacgttctcgacttcgatgatctgattttattgccgacgttgctgctgcaacgcaatgaagaagtccgcaagcgctggcagaacaaaattcgctatctgctggtggatgagtatcaggacaccaacaccagccagtatgagctggtgaaactgctggtgggcagccgcgcgcgctttaccgtggtgggtgacgatgaccagagcatctactcctggcgcggtgcacgtccgcaaaacctggtgctgctgagtcaggattttccggcgctgaaggtgattaagcttgagcagaactatcgctcttccgggcgtattctgaaagcggcgaacatcctgatcgccaataacccgcacgtctttgaaaagcgtctgttctccgaactgggttatggcgcggagctaaaagtattaagcgcgaataacgaagaacatgaggctgagcgcgttactggcgagctgatcgcccatcacttcgtcaataaaacgcagtacaaagattacgccattctttatcgcggtaaccatcagagccgggtgtttgaaaaattcctgatgcaaaaccgcatcccgtacaaaatatctggtggtacgagctttttctctcgtcctgaaatcaaggacttgctggcttatctgcgcgtgctgactaacccggacgatgacagcgcatttctgcgtatcgttaacacgccgaagcgagagattggcccggctacgctgaaaaagctgggtgagtgggcgatgacgcgcaataaaagcatgtttaccgccagctttgatatgggcctgagtcagacgcttagcggacgtggttatgaagcattgacccgcttcactcactggttggcagaaatccagcgtctggcggagcgggagccgattgccgcggtgcgtgatctgatccatggcatggattatgaatcctggctgtacgaaacaagccccagcccgaaagccgccgaaatgcgcatgaagaacgtcaaccaactgtttagctggatgacggagatgctggaaggcagtgaactggatgagccgatgacgctcacccaggtggtgacgcgctttactttgcgcgacatgatggagcgtggtgagagtgaagaagagctggatcaggtgcaactgatgactctccacgcgagcaaagggctggagtttccttatgtctacatggtcggtatggaagaagggtttttgccgcaccagagcagcatcgatgaagataatatcgatgaggagcggcggctggcctatgtcggcattacccgcgcccagaaggaattgacctttacgctgtgtaaagaacgccgtcagtacggcgaactggtgcgcccggagccgagccgctttttgctggagctgccgcaggatgatctgatttgggaacaggagcgcaaagtggtcagcgccgaagaacggatgcagaaagggcaaagccatctggcgaatctgaaagcgatgatggcggcaaaacgagggaaataatcaaggccggaaaagatgcgtcagcatcgcatccggcacttactcattaatgcacttccagcggccagtggacatagctctgccactggctttcctgagcaataatctctttacccagcggatgttgggttagccaaccttgcggaagcgtcaaggtcaacagttcatggttagcctgtaatgtcatctctggcacgagatcgtcacggcgacggctggcaaaaatgatggccaggcgtagtaaacggcagagttgttctgcgacgcgcggcggtacggcattttgctgatgcaggctactgagatcgaccggattagtctggttgagcagtagcgtcgccagcaattttttctgtgcgggggtaaaaccgggaagatccagattacgcaccagataagcagcgtgttgcggcgcttgtttgaagtcaacgctcaggccgatttcatgaagctgacaggcgctgatgagcaaatcgcggcttattgcttcaagatgccattcgttttccacctgatcgaagaagttagccgcaactttggctacgcgctgtgcctgatcaatatcgatcataaagcggcgttgaatattacgcagcgtacggctgcgaatatcctgctcgacggccagatgcaacatgccgtagaccaggccttcacgcagcgcaccgcccgccagggtcatacactgaatattcagttcggtaaaaatggcgatcaggatcgccagaccactcgggaacactaacgcacgttccagcgtcagcccgtcaatctccagttcctccagccgaccgcaatgaatggctcgctgtttcaattgctgcaacttttccagggtaatgcgttcatccatcccctgtgccatcatgatttcctgtaacgcctgcacggtgccggaagcaccaacgcacactttccagccgtgataccgtaattcatcggcaaccggacgtaacacttcgcgtgccgctttttctgcagcatcaaaattttcctgccccagattacgatcggcaaaatagcgttccagccaggtgacgcagcccatgctcaggctgaacaagctggtggtttgtgcacccgtgccggttaccagttcagtactggctccgcctatatccaccaccaggcgctgatcggcaccaccagtggtgtgagcaacgccctgataaatcagacgtgcttcctcttcaccgctgatcacctgtaccggacaaccgagaatttcctgcgctttggcaataaaatcacccgcattgacggcaaggcgtaacgtcgccgtagcgacaacgcgaatttggctgggaggaatatcttgcagacgttcagcaaacaggcgcaaacattgccaaccgcgctccattgcttcattggagagggcattttcgctattcaggccagcagccagacgcactttgcgttttattcgcgtcagcgtctggatgcttccagccacctcgcgcacaaccagcatatgaaaactattgctaccgagatcaatggctgcatacaggctgctggtggaacccatactcttcatccttcaatctgtctctgtgttggctgcattctttcacctgaatcacttactacagtaagctcatcgggattcattctcttgccatcttgatacagtttgaatgattttgagtatgacattttttatttaaccactacgacgacgattacgcggagcgccagtacgacgcggaccattgcctgtgcgcgggcgcgtgaggcgcagcggttttggcagatcggtcatcaatgcgtccggattgtatttgcttaccggaatactgtgaccaatataggtctcaatagcaggcaaattcaatgcatactcttcacacgccaggctgatagagtgaccgcttgcgcctgcgcgacctgtacgaccaatacggtgaacgtaatcttcacagtcatcgggtaaatcgtagttaaagacgtgcgtcactgccggaatatgcaaaccacgcgcggcaacgtcggtggcaaccagaatatccagatcgccacgggtaaattcatcaagaatacgcagacgttttttctgcgcgacatcgcctgtcaataaaccgacacgatgaccatctgctgccaggtggccccagatctcttcacaacggtgtttggtgttggcgaaaataatcgctctgtctggccactcttcttcgatcagcgtttgcagcaaacgcattttttcttcgttagaagggtagaaaagctcttctttaatacggtggcccgttttctgttccggttccacttcaatatattcggcattgttcatctgctcgaacgccagttcacgtacccggtagctaagcgtggcggagaacagcatgttgaggcgctggtttgcaggcggcatacggcggaacagccagcggatatctttaataaagcccagatcgtacatgcgatcggcttcgtccagtaccaccacctgaatggcaccgaggttaatgtggttctgcttggcgtagtcaattaaacgccccgtggtgccaatcagaatgtcaacgccgctttccagcactttcagctgtttgtcgtagccatcaccaccgtaagccagacccagcttcaggccagtagcttccgccagcggttctgcgtcggcatggatctgcacggcaagttcacgcgtcggtgccataattaaggcacgcggctgattcaccttgcgatcggcaatcgcaggatgagagagaagataatgaaacgtactcgtaagaaacgccatcgttttcccggtaccggtttgcgcctgcccggctacgtcacgacccgccagcgtcagcggaagggccagtgcctgaatgggcgtacagttatgaaacccttttttttcaagggcttctacaaccttcggatgcagggcgaagtcggaaaacttctgttctgttaaatgtgttttgctcatagtgtggtagaatatcagcttactattgctttacgaaagcgtatccggtgaaataaagtcaacctttagttggttaatgttacaccaacaacgaaaccaacacgccaggcttattcctgtggagttatatatgagcgataaaattattcacctgactgacgacagttttgacacggatgtactcaaagcggacggggcgatcctcgtcgatttctgggcagagtggtgcggtccgtgcaaaatgatcgccccgattctggatgaaatcgctgacgaatatcagggcaaactgaccgttgcaaaactgaacatcgatcaaaaccctggcactgcgccgaaatatggcatccgtggtatcccgactctgctgctgttcaaaaacggtgaagtggcggcaaccaaagtgggtgcactgtctaaaggtcagttgaaagagttcctcgacgctaacctggcgtaagggaatttcatgttcgggtgccccgtcgctaaaaactggacgcccggcgtgagtcatgctaacttagtgttgacttcgtattaaacataccttattaagtttgaatcttgtaatttccaacgcttcccgttttatcttaaatgcgaagtgaacagatttctggcagcagtctcaatccgtcttgtcgtttcagttctgcgtactctcctgtgaccaggcagcgaaaagacatgagtcgatgaccgtaaacaggcatggatgatcctgccataccattcacaacattaagttcgagatttaccccaagtttaagaactcacaccactatgaatcttaccgaattaaagaatacgccggtttctgagctgatcactctcggcgaaaatatggggctggaaaacctggctcgtatgcgtaagcaggacattatttttgccatcctgaagcagcacgcaaagagtggcgaagatatctttggtgatggcgtactggagatattgcaggatggatttggtttcctccgttccgcagacagctcctacctcgccggtcctgatgacatctacgtttcccctagccaaatccgccgtttcaacctccgcactggtgataccatctctggtaagattcgcccgccgaaagaaggtgaacgctattttgcgctgctgaaagttaacgaagttaacttcgacaaacctgaaaacgcccgcaacaaaatcctctttgagaacttaaccccgctgcacgcaaactctcgtctgcgtatggaacgtggtaacggttctactgaagatttaactgctcgcgtactggatctggcaagtcctatcggtcgtggtcagcgtggtctgattgtggcaccgccgaaagccggtaaaaccatgctgctgcagaacattgctcagagcattgcttacaaccacccggattgtgtgctgatggttctgctgatcgacgaacgtccggaagaagtaaccgagatgcagcgtctggtaaaaggtgaagttgttgcttctacctttgacgaacccgcatctcgccacgttcaggttgcggaaatggtgatcgagaaggccaaacgcctggttgagcacaagaaagacgttatcattctgctcgactccatcactcgtctggcgcgcgcttacaacaccgttgttccggcgagtggtaaagtgttgaccggtggtgtggatgccaacgccctgcatcgtccgaaacgcttctttggtgcggcgcgtaacgtggaagagggcggcagcctgaccattatcgcgacggcgcttatcgataccggttctaaaatggacgaagttatctacgaagagtttaaaggtacaggcaacatggaactgcacctctctcgtaagatcgctgaaaaacgcgtcttcccggctatcgactacaaccgttctggtacccgtaaagaagagctgctcacgactcaggaagaactgcagaaaatgtggatcctgcgcaaaatcattcacccgatgggcgaaatcgatgcaatggaattcctcattaataaactggcaatgaccaagaccaatgacgatttcttcgaaatgatgaaacgcagttaaatttgtcttatgccaaaaacgccacgtgtttacgtggcgttttgcttttatatctgtaatcttaatgccgcgctggcgatgttaggaaaattcctggaatttgctggcatgttatgcaatttgcatatcaaatggttaatttttgcacaggactggtgggtttggaacggactttcccttctgaataaaggtcttcgtggttatacttctgctaataattttctctgagagcatgcattgtgaatttactgacagtgagtactgatctcatcagtatttttttattcacgacactgtttctgttttttgcccgtaaggtggcaaaaaaagtcggtttagtggataaaccaaacttccgcaaacgtcaccagggattgatacctctcgttggggggattagcgtttacgcagggatttgcttcacgttcggaattgtcgattactatattccgcatgcatctctctatctcgcttgtgccggtgtgcttgttttcattggcgcgctggatgaccgttttgatatcagcgtaaaaatccgtgccaccatacaggccgctgttggcattgttatgatggtgttcggcaagctttatctcagtagcctgggttatatctttggctcctgggagatggtgctcggaccgtttggttacttcctgacgctatttgccgtctgggcggccattaatgcgttcaacatggttgatggcattgatggcttgctgggcgggttgtcctgcgtcagctttgcagcaatcggtatgattttgtggttcgacgggcaaaccagcctcgcaatctggtgctttgcgatgatcgccgccatcctgccatacatcatgcttaaccttggtatcctgggtcgccgctacaaagtctttatgggtgatgcgggcagtacgctgattggttttaccgttatctggatcctgctcgaaacgacccagggcaaaacccatcccatcagcccggttaccgctttgtggataatcgccattccgctaatggatatggtggcgattatgtaccgtcgcctgcgtaaaggcatgagcccattctctcctgaccgtcagcatattcaccatttgatcatgcgtgccgggtttacttcccgtcaggcgtttgtgctgattacccttgccgcagcactgctcgcttccattggcgtgctggcagaatattctcattttgtcccggagtgggtcatgctggtgctctttttgctagcattcttcctctatggatattgcattaagcgtgcctggaaagttgctcgctttattaagcgcgtaaaacgcagactgcgtagaaatcgtggtggcagccccaatttaaccaaataaatgaggatgtgatgacacaaccaatgcctgggaaaccggccgaagacgctgaaaatgaactggatattcgtgggttgtttcgtaccttgtgggctgggaagctatggattattggcatggggctggcgtttgcgttaatcgcgctggcgtatacgttttttgctcgtcaggagtggagcagcacggcgattaccgatcgtccaacggtgaatatgctggggggatattacagccagcagcaatttttgcgtaacctggatgtccgtagtaacatggcttctgccgaccaaccaagcgtcatggacgaagcctataaagagtttgttatgcaactggccagctgggatacccgcagagagttctggctgcaaaccgactattacaaacagcggatggtgggcaacagcaaagccgatgcggcgttgctggatgaaatgattaacaacatccagtttatccccggagactttacccgcgcggtcaatgacagcgtgaagcttattgccgaaaccgcgcctgacgctaataacctgttacgtcagtatgttgcttttgccagccagcgtgcagccagccatctgaatgatgagctgaaaggcgcatgggcggcgcgtaccatccagatgaaagctcaggtgaagcgtcaggaagaggtggcgaaagccatctacgaccgccggatgaacagcattgagcaggcgctgaaaattgctgagcagcataatattagccgcagtgcgacagatgtacctgccgaggaattacctgatagtgaaatgttcctgcttgggcgtccaatgcttcaggctcgactggaaaatttacaggccgtcggtccggcctttgatctcgactatgatcagaatcgggccatgttaaacaccctgaatgttggtccaaccctggatccgcgttttcagacctatcgctatttgcgtacgccggaagaaccggtaaaacgcgatagcccacgtcgtgccttcctgatgattatgtggggcattgtcggggggctgatcggggctggtgtcgcattaacccgccgttgcagcaaataacaacactgctgcggtgagcgcaaaggcgctcgccgcttattcgaagagaatcgatgtgaaagtactgactgtatttggtacgcgcccggaagccatcaagatggcgccgttggtgcatgcgttggcaaaagatcctttttttgaggctaaagtttgcgtcactgcgcagcatcgggagatgctcgatcaggtgctgaaactcttttccattgtacctgactacgatctcaacataatgcagccaggacagggcctgacagagataacctgtcggattctggaagggctaaaacctattcttgccgagttcaaaccagacgtcgtgctggttcacggcgatacgacgacgacgctggcaaccagcctggcggcgttttatcagcgtattcctgttggtcacgttgaggctggtctgcgcacgggcgatctctatagcccgtggccggaagaggctaaccgtacattgaccgggcatctggcgatgtatcacttctctccaaccgaaacttcccggcaaaacttgctgcgtgaaaacgttgcggatagccgaatcttcattaccggtaatacagtcattgatgcactgttatgggtgcgtgaccaggtgatgagcagcgacaagctgcgtagtgaactggcggcaaattacccgtttatcgaccccgataaaaagatgattctggtgaccggtcacaggcgtgagagtttcggtcgtggctttgaagaaatctgccacgcgctggcagacatcgccaccacgcaccaggacatccagattgtctatccggtgcatctcaacccgaacgtcagagaaccggtcaatcgcattctggggcatgtgaaaaatgtcattctgatcgatccccaggagtatttaccgtttgtctggctgatgaaccacgcctggctgattttgaccgacagtggcggcattcaggaagaagcgcctagcctggggaaacctgtgctggtgatgcgcgataccactgagcgtccggaagcggtgacggcgggtacggtgcgtctggtaggcacggataagcagcgaattgtcgaggaagtgacgcgtcttttaaaagacgaaaacgaatatcaagctatgagccgcgcccataacccgtatggtgatggtcaggcatgctctcgcattctggaagcgttaaaaaataatcggataagtctatgagttttgcgaccatttctgttatcggactgggttatatcgggctgccaacggcagcagcgtttgccagtcggcaaaaacaggtaattggtgtcgatatcaaccaacatgcggttgataccatcaatcgtggcgaaatccatatcgtcgaacctgatttggcgagtgtagtaaaaactgccgtagaaggcggttttttacgagcgagcacgacgccagttgaagcggatgcctggctgattgctgtacccacgccgtttaagggcgatcatgagccagatatgacctacgttgaaagcgctgctcgctccattgcgccagtgctgaaaaaaggcgcgctggtgatccttgaatccaccagcccggtggggagtaccgagaagatggcagaatggttagcagagatgcgtccggatctcactttcccgcagcaggtgggcgagcaggcggacgtcaacattgcttactgcccggaacgcgtgttaccaggacaggtaatggtcgagctgattaaaaacgatcgcgtgattggtggtatgacgccggtttgtagcgcccgcgccagcgaactgtacaaaattttcctcgaaggtgagtgtgtcgtcactaacagccggacggcggaaatgtgtaagctcaccgaaaacagcttccgcgatgtgaatatcgcttttgctaatgaattgagcctgatttgtgccgatcaggggattaacgtctgggaactgattcgcctggcgaatcgtcaccctcgcgttaatattcttcagcctggccctggcgtgggcggtcactgcattgctgttgatccgtggtttatcgtggcacagaacccccagcaggcgcggcttatccgtaccgcgcgcgaagtgaacgatcacaaaccgttctgggttatcgatcaggtgaaagcggcggtggctgattgcctggcggctaccgataaacgcgccagtgaactgaaaatcgcctgctttggtctggcgtttaaaccgaatattgatgacctgcgcgaaagcccggcgatggaaatcgctgaactgatcgcccagtggcatagcggcgaaactctggttgttgagcctaacatccaccagttgccgaaaaaactgaccgggctttgtactctggcgcagcttgacgaggcgctggcaacggcagacgtgctggtgatgctggtcgatcatagtcagttcaaagttatcaatggcgacaatgtccatcagcagtatgtcgtcgatgccaaaggagtctggcgctgatgagaaaaattctgataacaggtggtgccgggtttattggcagcgcgctggtgcgttatatcatcaacgaaacgagcgacgcggtggtagtggtcgataagctgacctacgccggaaacctgatgagcctggcaccggtcgcgcaaagcgagcgctttgcctttgagaaagttgatatctgcgatcgggcagaactggcacgcgtattcactgagcatcagccagactgtgtcatgcatctggcagccgaaagccatgttgaccgttctattgacggcccggcagcgtttattgaaaccaacattgtcgggacttatacattgcttgaagcggcgcgggcttactggaatgcgctgacggaagataaaaaaagtgcgttccgttttcatcatatctccactgacgaagtatatggtgacctgcacagcacggatgatttcttcaccgaaaccacgccgtatgcgccgagcagcccttattccgcgagtaaagccagcagcgaccatctggtgcgcgcctggctgcggacctatggtctgccgacgcttatcaccaactgcagcaataactacggcccttaccactttccggaaaaactgatcccgctgatgatcctcaacgcgctggcgggtaaaagcctgccggtatatggcaacgggcagcaaatccgtgactggctgtatgtggaagatcacgcccgcgcgctgtattgcgtggcgaccaccgggaaagtcggtgaaacctataatattggtggtcacaacgagcgtaagaatctcgatgttgtggaaaccatttgcgagctgctggaagaactggctccgaacaagccgcacggcgtggcgcactatcgtgacctgatcacctttgtcgctgaccgtccggggcatgatctgcgttatgccattgatgctagcaaaattgcccgtgaacttggctggctgccgcaggaaacctttgaaagtggaatgcgtaaaacggttcagtggtatctggctaatgaaagctggtggaagcaggtgcaggacggcagctatcagggcgagcgtttaggtctgaaaggctaattttcagcggaggcaaacatgaaaggtattatcctggcgggcggttccggcacccgattgcatccgattacgcgcggcgtaagcaagcaactgttgccgatttacgataagccaatgatttactatccgctgagcgtgctgatgctggccggtatccgcgaaattctcatcatcactacgccggaagataaaggttatttccagcgcctgctgggcgatggtagtgagttcggtatccagctggaatatgccgaacagcccagcccggacggtctggcgcaggcctttatcatcggtgaaaccttccttaatggtgaaccttcttgtctggtgctgggcgataacatcttcttcggtcagggcttcagtccgaagctgcgtcatgttgcggcgcgcaccgaaggggcgacggtttttggctatcaggtgatggacccggaacgctttggcgtggtggagtttgacgacaatttccgcgctatcagcctggaagaaaagccaaaacagccgaagagtaactgggcggtgaccgggctttatttctacgacagtaaagtcgtggagtacgcaaagcaggtgaagccgagcgagcgtggtgaactggagattacctccatcaaccagatgtacctcgaggcgggcaacctgaccgttgaactgctcgggcgcggatttgcctggctggataccggcactcacgacagcctgattgaagccagcacctttgtacagacggtggaaaaacgccagggctttaagattgcctgcctggaagagattgcctggcgtaacggctggctcgatgacgagggtgtgaagcgtgctgccagtagtttagcgaaaactggctacggccaatatctgctggagttacttcgtgcccgtccgcgccagtattgagccactaacctgggaaaacgccttctttggtgttaacagcgccatcgtgcgcattacgtctgaagcaccgctcctgacgccagacgcgttagcgccgtggtcacgggtgcaggccaaaattgcggcaagtaatacgggtgaactggatgccctgcaacagctgggattctccctggtagaaggtgaagttgatttggcgctacccgtgaacaatgccagtgatagcggtgctgtagtggcacaagagaccgatattcccgcattacgtcagttagccagcgccgcatttgcgcaaagccgttttcgtgcgccgtggtatgcgcctgacgccagcagtcgcttttatgcacagtggattgaaaatgccgtgcgcggcacctttgatcatcaatgtctgattttacgtgcggcgtccggcgatattcgcggctatgtctctttacgggaactcaatgcgacagatgcgcgaattggcctgctggctggacgcggtgcaggtgctgagctgatgcaaacggcgctaaactgggcgtatgctcgcggtaaaacaactttgcgggtggcgacccaaatgggcaacaccgccgcgcttaaacgatacatacaaagtggtgcgaatgtagaaagcaccgcgtactggttatacaggtgatcacatgattccatttaacgcaccgccggtggtgggaaccgaactcgactatatgcagagcgcaatgggtagcggcaaactgtgtggcgatggcggttttacccgtcgctgccagcagtggctggagcaacgttttggcagcgccaaagtgttactgacgccgtcctgcaccgctagcctggagatggcggcgctgctgctcgatatccagcctggcgatgaagtgatcatgccgagctacacctttgtctccaccgccaatgcctttgtgctgcgtggcgcaaaaatcgtttttgtggatgttcgcccggacaccatgaacatcgacgaaacgctgattgaagcggcgatcaccgacaaaacgcgcgttatcgtgccggtccattacgcgggtgtggcctgcgaaatggacaccattatggcgttggcgaaaaagcataatttgtttgtggtagaagatgccgctcagggcgtgatgtccacttacaaagggcgtgcactgggaaccattggtcatattggctgctttagcttccatgaaaccaaaaactacacggcgggcggtgaaggcggcgcgacgctgattaacgataaagcgttaatcgaacgagccgagatcatccgtgaaaagggcactaaccgcagccagttcttccgtggtcaggtcgataaatatacctggcgcgatattggctccagctatttgatgtccgatctgcaagctgcatacctgtgggcgcaactggaagcagcggatcgtatcaaccagcaacgtctggcgctgtggcaaaactactacgatgcgttagcgcctctggcgaaagccgggcgtatcgagctgccgagcattcccgatggctgcgtgcagaacgcgcatatgttctacattaaactgcgggatattgatgaccggagcgcgttgattaactttctgaaagaagcggaaatcatggcggtgtttcattacattccgctgcacggttgccctgcgggggaacactttggtgagttccacggtgaagatcgctacaccaccaaagagagcgagcgcctgctgcgcctgccgctgttctacaacctgagccccgtcaatcagcgtacggtaattgcgactttgttgaactacttttcctgatatgagcttggcaaaagcgtccttgtggacggcggccagtacactggtcaagattggtgccgggttactggtcggtaagttgctggcggtgagttttggtccggcggggcttgggctggcggcaaatttccgccagttgattaccgtgctcggcgtgcttgccggggctggcatctttaacggtgtaaccaaatacgttgcccagtaccatgataatccgcaacagctgcgccgcgtggtcggcactagtagtgcgatggtacttggtttctctacgctgatggcgctggtttttgtgctggcagctgcgccaatcagccagggattgtttggtaataccgactatcaggggctggtgcgtttagtggcgctggtgcaaatggggatcgcctggggcaacctgttactggcgctgatgaaaggctttcgcgatgccgcaggtaatgcgttaagcctgattgtcggcagcttgattggcgttctcgcgtactacgtcagttaccgtttgggcggttatgaaggggcgttgctgggtctggcgctgattcccgcgctggtggtaattcctgccgccatcatgttgatcaaacgtggtgtcatcccgttaagctatctgaaacccagctgggataacggtctggcagggcagttgagcaaatttacgctcatggcgttgattacgagcgtgaccttgcctgttgcttacatcatgatgcgtaaactgctggcggcgcagtatagctgggatgaggtggggatctggcaaggggtgagcagtatttccgatgcctacctgcaatttattacggcaagcttcagcgtatatttgctgcccacgttgagccggctaacggaaaagcgcgatatcacccgggaagtggttaaaagcctgaaattcgtcttaccggcagtggcggcggcgagttttaccgtctggctgctgcgtgattttgctatctggctgctgttgagcaataaatttaccgctatgcgcgatctctttgcctggcagttagtgggtgatgtgttaaaagtgggcgcttatgtctttggttatctggtgatcgccaaagcgagtctgcggttttatattctggcggaagtcagccagttcactttattgatggtatttgcccactggctaatccctgcgcatggtgcactgggcgcggcgcaggcatatatggcaacttatatcgtctatttttctctttgttgtggcgtgtttttactctggcgtaggcgggcatgactgtactgattcacgtactgggaagcgatatccctcaccataaccgaaccgttttgcggtttttcaatgacgcgctggccgcgacgagcgagcacgcgcgcgagtttatggttgttggcaaggacgacggcttaagtgatagctgtccggcgctttctgtgcaatttttccctgggaaaaaaagcctggcggaagcggtcatcgcgaaagcaaaagctaaccgtcagcagcgttttttcttccacggtcagttcaatcccacactgtggctggctctgctgagtggtggcattaagcccagccagtttttctggcatatctggggggcagacctgtatgagctttccagtggcttgagatataagcttttttacccactacgtcgcctggcgcaaaagcgagtcggctgtgtatttgccacccgcggcgatttgagcttttttgccaaaacgcacccaaaggtgcggggcgaactgctgttcttcccgacgcggatggaccctagcctcaatacgatggcgaacgatcggcaacgtgaagggaaaatgaccattctggtggggaactccggcgaccgcagcaatgagcatattgctgccttgcgcgccgttcatcagcaatttggcgatacggtaaaagtggtggtgccgatgggatatccgcctaataacgaagcgtacattgaggaagttcgtcaggcggggctggagttattcagcgaagaaaatctacaaattctgagcgaaaaactggaatttgacgcctatctggcgctacttcgtcagtgcgatcttggttactttatttttgcccgccagcagggcattggtacgctgtgcttactgattcaggcgggcattccttgtgtgcttaaccgggaaaatccgttctggcaggatatgacggaacaacatttgccggtgctgtttactaccgacgatctcaacgaggatattgtgcgtgaagcgcagcgccagttggcgagcgtggataaaaacaccattgccttctttagccctaactatctacaaggctggcagcgggcgttggcgattgccgccagggaggtcgcatgagtctgctgcaattcagtggcctgtttgttgtctggctgctctgcacgctgtttattgccacgctgacctggtttgagtttcgccgtgtgcgctttaacttcaatgtcttctttagtttgctgtttttgctcacctttttcttcggcttcccgctgaccagcgtgctggtatttcgctttgatgttggtgtcgcgccgccagaaatcttgttgcaggcgttgctttctgcgggctgcttctacgcggtttactatgtcacctacaaaacccgcctacgcaaacgcgttgctgatgtaccgcgccgtccgctgtttaccatgaaccgcgtggagaccaatcttacgtgggtgatcctgatgggtatcgcgctggtaagcgtcggcatcttcttcatgcacaacggctttttgctgttccggcttaactcctacagtcagatcttttccagtgaagtctccggcgtggcgttaaaacgcttcttttactttttcatcccggcgatgctggtggtctactttctgcgccaggacagcaaagcgtggctgtttttcctcgtcagcacggtcgcctttggcttgctgacttatatgattgtcggcggcactcgcgccaatatcatcatcgcattcgctatcttcctgtttattggcattattcgcggctggattagcttgtggatgctggcggcggcgggcgtgctggggattgttggcatgttctggctggcactaaaacgctatggaatgaatgtgagcggcgatgaagcgttctatacgtttctctatctcactcgcgacaccttcagcccgtgggagaatctggcgttgctgttgcagaactacgacaacatcgacttccagggcctggctccaattgtccgcgatttctatgtctttatcccttcctggctgtggccgggtcgcccgagtatggtgctgaacagtgccaactactttacctgggaagtgctgaataaccactccggactggcgatcagccctacgcttataggcagtctggtggtgatgggcggcgcgttgttcatcccgctcggggcgatcgtggttggtctgatcatcaaatggttcgactggctgtatgagctgggcaaccgcgagcctaatcgctataaagctgcgatattgcacagtttctgctttggggcgatcttcaatatgatcgtgctggcgcgtgaagggctggatagctttgtcagtcgcgtggtcttttttatcgtggtcttcggcgcatgtctgatgatcgcaaaactgttgtactggctttttgaaagcgccggactcattcataaacgtacaaaaagtagcctccggacgcaggttgaaggataacaatgaataacaacaccacggcaccaacctatacgctgcgtggcttacagttgattggttggcgtgatatgcagcacgccctcgattatctgtttgctgacgggcagcttaagcagggaacgctggttgccattaatgctgaaaaaatgctgactattgaagataacgccgaggtcagggagttaattaacgctgccgaatttaaatatgcggatggcatcagcgttgtacgtagtgtacgtaaaaagtacccgcaggcgcaggtttcccgcgttgccggtgccgatctctgggaagagctgatggcgcgcgcaggcaaagaagggacgccggtatttcttgtgggcggtaaacctgaagtgctggcgcaaactgaagctaaactgcgcaaccagtggaatgtgaatatcgttggcagtcaggatggttattttaaacccgagcagcgtcaggcgctgtttgaacgcattcatgccagcggtgcgcaaatcgtcaccgttgcgatgggaagcccaaagcaggagatcatcatgcgcgactgccgtctggtacatccagatgcgctgtatatgggcgttggcgggacttacgatgttttcaccggtcacgtaaaacgcgcaccgaaaatctggcaaacgctggggctggagtggctctaccgcctgcttagccagccgagccgcattaagcgtcagcttcgtttgctgcgttatttacgctggcactacaccggcaacctatgattttcctctctttgtaaagcgacggagtggtcactccgtcgcctgtctgcttttttattacacaaagcattcaaatttttaatgctttatttgccatttctcctgaattacgaaaacatttgcaacactcgatgtacccataacgataaccggtaacaccggaaagcatgcaaacacaacacgaggatttatggcagataacaaaccagagctacagcgtgggctggaagctcgacatatcgaactcatcgccctggggggcaccattggcgtcggcctgtttatgggggccgccagtaccctgaaatgggccgggccatccgtattgttggcctatatcatcgccgggctgttcgtctttttcatcatgcgtagtatgggcgaaatgttgttcctcgaaccggttaccggtagcttcgccgtttatgcgcatcgttatatgagcccgttctttggctatctcaccgcctggtcttactggtttatgtggatggcggtggggatctctgaaatcaccgccattggcgtttatgtccagttctggttcccggagatggcgcagtggatacccgcattgatcgcagtggcgctggtggcgttggcgaatctggcggcggtgcggttgtacggcgaaatcgagttctggttcgcgatgatcaaagtcaccacgattatcgtgatgattgtcattggcctgggcgtgattttctttggctttggcaatggcgggcagagcattggttttagcaatctcacagagcatggcggtttctttgcgggtggctggaaagggttcctgaccgctctgtgtattgtggtggcgtcctaccagggcgtggagctgattggcattactgccggtgaagcgaagaatccgcaggtgacgctgcgcagtgccgtaggcaaggtgctgtggcggatcctgattttctacgtaggcgcgattttcgttatcgtcaccatcttcccgtggaatgaaataggcagcaacggcagcccgttcgtactgacttttgccaaaatcggtattaccgcagcggcgggcattatcaactttgtggtgctgacggctgcgctctctggctgtaacagcggcatgtacagttgcggacgtatgctctacgcactggcgaaaaaccgtcagttaccggcggcaatggcgaaagtttcccgtcacggcgtaccggttgcgggtgtggcagtatctattgctattctgctaattggcagttgcctgaactacatcattcccaatccgcagcgtgtgtttgtctacgtctacagtgccagcgtgcttccggggatggtgccatggtttgtgatattgataagccagctgcgttttcggcgtgcacataaagcggcgattgccagccatccgttccgcagtatcctgttcccgtgggccaattacgtaacaatggcattcctgatttgcgttttgatcggcatgtactttaatgaagatacgcgtatgagcctgtttgttggcatcatctttatgctggcggtgacggcgatttataaagtttttggccttaatcgccacgggaaagcgcataaactggaggaataagcagcaaaacgcacaaaccgtaaccaaacgcgcaatttatttaaaaagggactagacagaggggtgggaagtccgtattatccacccccgcaacggcgctaagcgcccgtagctcagctggatagagcgctgccctccggaggcagaggtctcaggttcgaatcctgtcgggcgcgccatttagtcccggcgcttgagctgcggtggtagtaataccgcgtaacaagatttgtagtggtggctatagctcagttggtagagccctggattgtgattccagttgtcgtgggttcgaatcccattagccaccccattattagaagttgtgacaatgcgaaggtggcggaattggtagacgcgctagcttcaggtgttagtgtccttacggacgtgggggttcaagtcccccccctcgcaccacgactttaaagaattgaactaaaaattcaaaaagcagtatttcggcgagtagcgcagcttggtagcgcaactggtttgggaccagtgggtcggaggttcgaatcctctctcgccgaccaattttgaaccccgcttcggcggggttttttgttttctgtgcatttcgtcaccctcccttcgcaataaacgcccgtaataactcattgccccacggtatgatttcgcccttaacgtattgaaggatgacttcaggcaaggagcgaccatgctgcaacaggttccaacgcgtgcttttcatgtgatggcgaaaccgagcggttccgattgtaatctgaactgtgactactgtttttatctcgaaaaacaatccctttaccgcgaaaagccagtcacgcatatggacgatgacacgctggaagcgtatgtccgtcactatatcgctgccagcgaaccgcaaaacgaagtggcttttacctggcagggcggcgaaccaacgctactcgggctggcgttttaccgccgtgccgtagcgctacaggcgaaatatggtgctggcaggaagataagtaacagcttccagactaacggcgtgctgctggatgacgaatggtgcgcgtttctcgcggagcatcattttcttgttggtttaagcctggatggcccgcctgagatccacaatcaatatcgcgtgactaaaggtggcagacccacgcataagctggtgatgcgtgccctgacgctcctgcaaaaacatcatgtcgactataacgtgctggtctgcgttaatcgcaccagcgcgcagcaaccgttgcaggtatatgattttttgtgcgatgcgggagtcgaattcatccagtttattccggtggtcgagcgcctggctgatgaaacaactgcccgcgatggacttaagttacatgcgcctggtgatattcagggtgagctaacggaatggagcgtgcgccccgaggagttcggtgagtttctggtggcgatattcgaccactggatcaaacgcgacgtcggcaagattttcgtgatgaatatcgaatgggcgtttgccaattttgtcggtgcgccgggtgcggtttgccatcatcagccaacctgtgggcgcagcgtgattgttgagcacaacggcgacgtttacgcctgtgatcactatgtttatccgcaatatcggctggggaatatgcaccagcaaacaattgcagaaatgatcgattccccgcaacagcaggcgtttggtgaagataaatttaagcagttaccggcgcagtgtcgcagttgtaacgtgttaaaagcgtgctggggaggctgcccgaaacaccgcttcatgctcgatgccagcggcaaaccgggactgaattatttgtgtgccgggtatcagcgttatttccgccatctaccgccatatcttaaagcaatggctgatttgctggcgcacggtcgcccggccagcgacattatgcatgcgcatttgctggtggtgagtaagtaaaaatcggcggccgcctgcggttgattgccggatgcggcgtaaacgccttatccggcctacatgatcgtgcaaattcaataaattgcagcgttctgtaggctggataagatgcgtcagcatcgcatccggcaaaggcagatctcagcgatagcgccggcttagtcagatttaatctgcgcgcgtggtggatattttttcaggatctccatatacgcgtgcatttcggtctgtagcggtacacccatcggaatatggcgcacgccgatggagtcgctttcctgcggatcggtgtagaggttaaacacgctgcttcccgccgtttgcattactgtgccggtgaatccaccctgatatccgctctgggtataagcgtaaggttgctgaatcaggacgtgatacttgaactcatccatacgcacagcagcgagtttaccgttgaggaagtagtgctcggccttacggttagactgaccatttgttcccaggaagaaggatgtctggtccacaccatcgataaaggtggttttcggcactaaattcgccactttcgctccaggatgccctgccagatccagcgcggtagggaagagatctgccagatcgacaataccgtcagatttacgcggttggatcatccctttccagtaaacgaaagtcggtacgcgaacgccgccttcccaggtgctacctttcgcaccacggaacggggtgcgtccgtgcggcggtacttcggcttccggtccgttatcggaggtaaagacgatcagcgtgttatcaagctgaccgtttttctccagtgttttatacagattagcgaacacatcgttcatctccaccatgcagtcgccatagctggtgcgtgccggagagctacccgcatatttcgcatttgggtagttatcgaagtggcagccacgagtgccgtagtagaggaagaatggtttatcgctcttcgccatcttgtcgaggaacttaacgccatagtccatccagcgttgatccagatcttccatatatttcggcgtaatgtcggcaatggcctgttgttcgccgccgcgcaccgcatgaacgtcatctttgctgaacggtaattgcttgatgtattcagaacggtccggactcagggccacttccggattgacgtgaacgtcgcgccattcggtgtacatatcagacacgctgttaaagccacggaaatcatcaaagccaacgttctgcggctggctctctttgttttcccccatatgccattttccgatggcctgagtgacgtagccctgatcgtgcagcaactgcggcagcgtggttaacccttgcagcccgcccggttgcccgtacattggcggcatcagaatgccgtggtggatggagtattgtccggtgagaatggtggcgcgggttggggaagagcttggttgagaatacgcgctagttaaaatcagcccctggctggcaacggcgtcgatatctggtgtagggttacccaccgccacgccgccaccgttaaaaccgacgtccatccagcccacatcgtccagcaagaaaacaaccacattcggtttcttaccggtttttttctcaagttctgccagcttctgctgggtttctttatcctgcgccggatgctgcattactggcatcatattgtcggcaatagtggtcgccggtttaaccagatactggtttgggtgatcgtatccggcaaagcctttgcgtgcggtggcagtactcggggtatctgctgcgctggccatgagaggaagagcggcggcgacagcaacaacaagacgtttgggactaaagctaaattccatgcaaaatgctccggtttcatgtcatcaaaatgatgacgtaattaagcattgataattgagatccctctccctgacaggatgattacataaataatagtgacaaaaataaattatttatttatccagaaaatgaattggaaaatcaggagagcgttttcaatcctacctctggcgcagttgatatgtaaggcaggtttattatatcgcgttgattattgatgctgtttttagttttaacggcaattaatatatgtgttattaattgaatgaattttatcattcataataagtatgtgtaggatcaagctcaggttaaatattcactcaggaagttattactcaggaagcaaagaggattacagaattatctcataacaagtgttaagggatgttatttcccgattctctgtggcataataaacgagtagatgctcattccatctcttatgttcgccttagtgcctcataaactccggaatgacgcagagccgtttacggtgcttatcgtccactgacagatgtcgcttatgcctcatcagacaccatggacacaacgttgagtgaagcacccacttgttgtcatacagacctgttttaacgcctgctccgtaataagagcaggcgtttttttatgtatcaggaaggccccggaggtgcttgcctccgggtgagaaggaattactgtggcgggttattctgcaacgttaacatcaaaccgtcgcgacgcatagctgcagcttcttccggcttgtgcagtctgtccagcgcgtcggcaagccatgcgtaatcgtaggcgtccggacgttgtttcagcgctgcgcggaaggcgaggcttgcttcctgccattctccgtgcttcatcagactctggcccagtgtgctccacaacagcgggcgatcgccgacgtttttgatttgctggcgcagcactttttccagctgttccggattgtttgttttcagtcgaggaatcggcagcagtaggcgatcgtcgtactggcgtttcaggccatcgatgataatttgctgggcagtatcatgatcgtcacattcaataagatgttccgccattgccacctgcaacgctacctgatgacgcgttttccggctttggtttttccaccagttacgcaaaccttcgctaccgttatcggcacgcgcctgatccatcaggccaatccatgcctgttgttccagcattgcacgatgttcttcatcaccaacatgggctttcgccatacttgggataatatccagcaggctactccatgcacctgtgcggatatacgcctgttccgccagacgtaatacttccggatggcgtggcgtaacttccagcagcttatccacgccgtggcgtgcagcatggttttcattacgggccagttgcagacgtacgcgggtgatttctaccggaatggtgtcgttgccggccagctccgctgcgcgttccagatgttggttggcgcgtgcttcatcaccacgttgttgcgcggcttcggcagccagtagatagttcaccaccggttgttccgcgtgatcggcatttttcgccatcagcttttcaacttgctgataatcgccttccgccagtttcagcagcgcctgttcggtctgcttacgtgcacggcgacgcttacgtccgacaaaccacccacgggtgtgcgcgccagtgcggaagatccgccgcagtagccactcaatggcaaacagcactaccatcgccagaatcaatatgatcgccaggcccgtgacgctggtttcgatattgtagttgtcggtctggatcagcacataaccctgatggccggcaatcatcgggccaaccacgatccccgcaatcagcaacacaaagagcaataacacttttagcatggttattctccttgcggcgcggctgccggagtatcagcttgcggtgcaggtgcaggtttagcttccgttgtccccgctgccggttgtgccagcaggttacgcacgcgagtctgcatcagtttttccagcatcgcctggctttgcagggtttccggaagatccatgctgatattttgctggcttaactggtccacctcgtcgaggaacgctttggtggtggcatcatcagtatcgtagtaagcacgtacccaggtggagacgttctccagcgcctggcgataagtctcttcctggtgacgcggtacagcttgtgctgcgaccagcaggcgagagcgaatattttcgcgcagatagatatcctgatttggcgctaacagcggtacggcggtgtcatcacgacggcgaatcgtaatgaagttgtccataaagttctgccagcttttttgcagattgatacgccattcgctgatggaactggaaagctcttcaccgtcactatccatcgggctaccatcgctgtcattatcggccagacgcaggttatctacctgattactaagctgattaagcttaaggatgatgccgtcataatccacctggcttactgcagaaaggctggcgatatcatcggtaattgcccgacgaacggtaatcagactcgggtcattcatatccgccaggctggcgtctgcacttttcagcaacgctgcagcggtcgtgacgtcctgatcgctccacagcttccgtccggcgagtttcaccagaaaatcggcctgagccagcagccaggttttagcatcgctgccggaaatggtggcgaccttttgttggacttcatccaactgttttgccagcgtttcttgctgacgattcgcctgcttaagttgtgcagcttgttgcttaataatgccttccagctcggctttttggctctcctgggctttttgcaatgccgtcagttggttagccagggcatcgctggtggcggtctgattgacggcctgttgtttaccccagccatacaaaccgatgcccgccgccagagcaatagcgatagccaccgcgctgagaatcaatgcggtattgttcttactctttttttctgttgcgacaggttgactcgtggtgtccacggcctccctggtctcttcaaccacggcggaggttttttcttgttccgtcattatggcttcctgttatgagagttattgtaatgcccgtaaaagcgcatcgttgtcagcgttatcggcgaccttaatgtcttgccagcccagttcccgggcgagtttcgccaaacgctcactgacgaccaatagtcgacagtgtagtaaccagtgctcacgataccattgtgggatcaggctccagagttgctgcaacatttcaccgctggtaacaacgaccatcgtcacctcgcgggcttgccagcgcatcgcttcttctgcaccatcgtaatggattgcgcatcgttgataacattcacaaaaagtgacctcagcaccgcgcgccgtcagggtatccccaattagctcacgaccaccattgccacgtaatatcagcgcacgtttgcccgcaatattttgtaattcaggtaattgtagcaagacttcgctgatttcccgatcctgcgggtagagaatcttctgtccacttacggtatgtagtgccagtgcggtggtgcgtccaatggcgaaataatcaggtagtcggggccatttacgatcttgctgatgcagctgactttgggcaaaagcaaccgcgtgttggctgagggcaaacaacagatcgctctcccccagcgctgccagttgatcagcaagttgcggtaattgttgacccggagaaaactcaatcagcggaaaatgccaggccacctgccccagtgtgcgcagacggctcactaactcttctccagcgggagacgggcgggtgacaaggatactcatgccggggcgtctccgttatagacttcagcgaggatctcgcgcgcgccgttattcagtagctcttctgccaggctaatccccatttgttcggcatcttgcggcgcaccgcggcgttcaccgcgaataatctggctaccgtccggcgcgccgaccagcgcacgcagccagatttcgccatcaataagctcggcgtagctaccaattggcacctgacatccgccttcgagacgggtattcatggcgcgttctgcggtaacgcgcagtgcagtttcgtggtgattcagcgcggcaagcagctcgcgagtgcgactatcatcaaggcggcattcaatacccaccgcaccttgtcctaccgccggaagagaaatctcgggtggcaacgcggcgcgaatacgactctccagacctaaacgttttagtccggctacggcaagaatgatggcatcgtattcgccgttatccagtttgctcaggcgagtgccgacgttgccgcgcagggagcggataatcagatccggacggcgttcagccagttggcactggcgacgtaaactggacgtcccgacgatactgcctgccggtaacgcatccagactgtcatagttattggacacaaaggcatcgcgaggatcttcacgctcacaaatagtgaccagtcccagaccttgcgggaattcaaccggcacatctttcatactgtgtacggcgatatcggcgcgattttcgaggagcgcgacttccagctcttttacaaataagccttttccgcctactttcgccagcggcgtatcaagaatcacatcgccgcgcgtcaccatcggtaccagttcaacgaccaggcccggatggctcgccatcaacttgtctttgacatagtgtgcctgccagagtgcaagtgggctttggcgtgtggcaattcttaaaacattgtctaacatgcttgttaccgtcattatcatccgtggtccatcctaacatccttgccagagtgatgtcagtgttgtggtgaaacgtagacgcctgcgcaaaccgtaaaatgaggtctggcagtggatcctgacaggcgtttcacgccgttgtaataaggaatttacagagaataaacggtgctacacttgtatgtagcgcatctttctttacggtcaatcagcaaggtgttaaattgatcacgttttagaccattttttcgtcgtgaaactaaaaaaaccaggcgcgaaaagtggtaacggttacctttgacatacgaaatatcccgaatgccgcgtgttaccgttgatgttggcggaatcacagtcatgacgggtagcaaatcaggcgatacgtcttgtacctctatattgagactctgaaacagagactggatgccataaatcaattgcgtgtggatcgcgcgcttgctgctatggggcctgcattccaacaggtctacagtctactgccgacattgttgcactatcaccatccgctaatgccgggttaccttgatggtaacgttcccaaaggcatttgcctttacacgcctgatgaaactcaacgccactacctgaacgagcttgaactgtatcgtggaatgagtgtacaggatccgccgaaaggtgagcttccaattactggtgtatacaccatgggcagcaccagctccgtagggcaaagttgttcctctgacctggatatctgggtctgtcatcaatcctggctcgatagcgaagagcgccaattgctacaacgtaaatgtagcctgctggaaaactgggccgccagcctgggtgtggaagtcagcttcttcctgattgatgaaaaccgcttccgtcataatgaaagcggcagcctggggggcgaagattgtggctccacccagcatatactgctgcttgacgaattttatcgtaccgccgtgcgtctcgccggtaagcgtattctgtggaatatggtgccgtgcgacgaagaagagcattacgacgactatgtgatgacgctttacgcgcagggcgtgctgacgccaaatgaatggctggatctcggtggcttaagcagcctttctgctgaagagtactttggtgccagcctttggcagctctacaagagtatcgattccccatacaaagcggtactgaaaacactgctgctggaagcctattcctgggaatacccgaacccacgtctgctggcgaaagatatcaaacagcgtttgcacgacggcgagattgtaagctttggtctcgatccatactgcatgatgctggagcgtgttactgaatacctgacggcgattgaagattttacccgtctggatttagtacgtcgctgcttctatttaaaagtgtgcgaaaagctcagccgtgaacgcgcctgcgtaggctggcgtcgcgcagtgttgagccagttagtgagcgagtggggttgggacgaagctcgtctggcaatgctcgataaccgcgctaactggaagattgatcaggtgcgtgaggcgcacaacgagttgctcgacgcgatgatgcagagctaccgtaatctgatccgctttgcgcgtcgcaataaccttagcgtctccgccagtccgcaggatatcggcgtgctgacgcgtaagctgtatgccgcgtttgaagcattaccaggtaaagtgacgctggtaaacccgcagattagtcccgatctcagcgaaccgaatctgacctttatttatgtgccgccgggccgggctaaccgtagtggttggtatctgtataaccgcgcgccaaatattgagagcatcatcagccatcagccgctggaatataaccgttacctgaataaactggtggcgtgggcatggtttaacggcctgctgaccagccgcacccgtttgtatattaaaggtaacggcattgtcgatttgcctaagttgcaggagatggtcgccgacgtgagccaccatttcccgctgcgcttacctgcaccgacaccgaaggcgctctacagcccgtgtgagatccgccatctggcgattatcgttaacctggaatatgacccgacagcggcgttccgcaatcaggtggtgcatttcgatttccgtaagctggatgtcttcagctttggcgagaatcaaaattgcctggtaggtagcgttgacctgctgtaccgcaacagctggaacgaagtgcgtacgctgcacttcaacggcgagcaaagcatgatcgaagccctgaaaactattctcggcaaaatgcatcaggacgccgcaccgccagatagcgtggaagtcttctgttatagccagcatctgcgcggcttaattcgtactcgcgtgcagcaactggtttctgagtgtattgaattgcgtctttccagcacccgccaggaaaccgggcgtttcaaggcgctgcgcgtttctggtcaaacctgggggttgttcttcgaacgcctgaatgtaagcgtacagaaactggaaaacgccatcgagttttatggcgcgattagccataacaaactgcacggcctgagtgtgcaggttgaaaccaatcacgtcaaattaccggcggtggtggacggctttgccagcgaagggatcatccagttctttttcgaagaaacgcaagacgagaatggctttaatatctacattctcgacgaaagcaaccgggttgaggtatatcaccactgcgaaggcagcaaagaggagctggtacgtgacgtcagtcgcttctacagcagtagccatgaccgttttacctacggcagtagcttcatcaacttcaacctgccgcagttctatcagattgtgaaggttgatggtcgtgaacaggtgattccgttccgcacaaaatctatcggtaacatgccgcctgccaatcaggatcacgatacgccgctattacagcaatattttagctgatgaacgtgccggaaagcgaggcttatccggcatgcaatcttagcggaaactgactgtttcacccgcctgctgcgtcgccgcctgttccagcaaatcccagaaggtttcgccgctgcgatcacaaatccactcatcgcctttcaggtcaaaatggtagccgccctgtttggttgccagccatacctggtgcagcggctcctggcggttgataatgattttgctgccattctcaaaggtaatggtcagtacgccgccgttgatttcgcagtcgatatcgctgtcgccatcccagtcgtccaggcgttcttcaatggtcagccagagttgatcagccaggcgatgaaattcactgtcgttcattgttgtatcctgtttttaagtgatggcggcagtatagcggcatggggtcagggcttcaaagtttgcacctctgcggctgcgttccggcacgatagttccgtcaccggaataatgatgtctctgtgtagcgaaagatttgtctctagtttagggcgcagttacaccacgtctttccctgtttctggtaaacattatgatcaggtttaccgagcgagcatcctcacgctgacggaactaaaaaagacaacaaacaaaccacattgcgatagtgcataaagccatcctggcgcgaggtgccgatcacgaaactaccagcaaaacataaatccccacgagtaagcgttatactcgcagcatttcctcacttttcagacttcataaagagtcgctaaacgcttgcttttacgtcttctcctgcgatgatagaaagcagaaagcgatgaactttacaggcaatccataatgaaaaacgtgtttaaggcactcactgtattacttactctcttcagcctgacgggctgcggtctgaaaggtccgctctatttcccgcctgcagataaaaacgcaccgccgccgaccaaaccggtagagacgcaaacgcaatccacggtgccggataaaaacgatcgcgccactggcgatggtccatcccaggtgaattactaaaagtcagtttctgtacccgcgtgattggagtaaatgatgcagttcagcaaaatgcatggccttggcaacgattttatggtcgtcgacgcggtaacgcagaatgtcttttttagtccggagctgattcgtcgcctggctgatcggcacctgggggtagggtttgaccaactgctggtggttgagccgccgtatgatcctgaactggattttcactatcgcattttcaatgctgatggcagtgaagtggcgcagtgcggcaacggtgcgcgctgctttgcccgttttgtgcgtctgaaaggactgaccaataagcgtgatatccgcgtcagcaccgccaacgggcggatggttctgaccgtcaccgatgatgatctggtccgcgtaaatatgggcgaacccaacttcgaaccttccgccgtgccgtttcgcgctaacaaagcggaaaagacctatattatgcgcgccgccgagcagacaatcttatgcggcgtggtgagcatgggaaatccgcattgcgtgattcaggtcgatgatgtcgataccgcggcggtagaaacgcttggtcctgttctggaaagccacgagcgttttccggagcgcgccaatatcggttttatgcaagtggttaagcgcgagcatattcgtttacgcgtttatgagcgtggggcaggagaaacccaggcctgcggcagcggcgcgtgtgcggcggttgcagtagggattcagcaaggtttgctggccgaagaagtacgcgtggaactccccggcggtcgtcttgatatcgcctggaaaggtccgggtcacccgttatatatgactggcccggcggtacatgtctacgacggatttattcatctatgaagcaaccaggggaagaactgcaggaaacactcacggagcttgatgaccgggcggttgtcgattatctgattaaaaatcctgagttttttatccgtaatgcgcgcgcagtagaagcgatacgtgtgccgcatccggtacgcggcaccgttagcttggtcgagtggcacatggcccgcgcacgtaatcatattcatgttctggaagagaacatggcgctgttgatggaacaggctatcgccaacgaaggcctgttttatcgcctactctacctgcagcgcagtctcaccgccgccagcagtctcgacgatatgctgatgcgctttcaccgctgggcgcgcgatctcggcctggcaggtgcgagtctgcgcctgtttccggatcgctggcgcttaggtgcgccgagcaaccacactcatctggcattaagccgtcagtctttcgaaccgctgcgtattcagcgtttggggcaggaacagcactatcttgggccgcttaacggaccagagctgctggtggtgctaccggaagcgaaagcggtgggaagcgtggcgatgagcatgctgggaagcgatgctgatttgggtgtcgtgctgtttaccagtcgcgatgccagtcactatcaacaagggcaaggaacgcagttacttcatgaaattgcgctgatgttgccggagcttctggagcgttggattgaacgcgtatgaccgatttacacaccgatgtagaacgctacctacgttatctgagcgtggagcgccagcttagcccgataaccctgcttaactaccagcgtcagcttgaggcgatcatcaattttgccagcgaaaacggcctgcaaagctggcagcaatgtgatgtgacgatggtgcgcaattttgctgtacgcagtcgccgtaaagggctgggagcagcaagtctggcgttacggctttctgcgctacgtagcttttttgactggctggtcagccagaacgaactcaaagctaacccggcgaaaggtgttagcgcaccgaaagcgccgcgtcatctgccgaaaaacatcgacgtcgacgatatgaatcggctgctggatattgatatcaatgatcccctcgctgtacgcgaccgtgcaatgctggaagtgatgtacggcgcgggtctgcgtctttctgagctggtggggctggatattaaacacctcgacctggagtctggtgaagtgtgggttatggggaaaggcagcaaagagcgccgcctgccgattggtcgcaacgctgtggcgtggattgagcactggcttgatttgcgcgacctgtttggtagcgaagacgacgcgctttttctgagcaaactgggcaagcgtatctccgcgcgtaatgtgcagaaacgctttgccgaatggggcataaaacaagggctgaataatcacgttcatccgcataaattacgtcacagcttcgccacgcatatgctggagagcagcggcgatcttcgtggtgtgcaggagctgctgggtcatgccaacctctccaccacgcaaatctatactcatcttgattttcaacaccttgccagcgtgtacgatgcggcgcatccacgcgccaaacgggggaaataatgcgtttttaccggcctttggggcgcatcagcgcgctcacctttgacctggatgataccctttacgataaccgtccggtgattttgcgcaccgagcgagaggcgcttacctttgtgcaaaattatcatccggcgctgcgcagcttccagaatgaagatctgcaacgcctgcgccaggcggtacgggaagcggaacccgagatttatcacgacgtgacgcgctggcgttttcgtagcattgaacaagcgatgctcgacgccgggctgagtgccgaagaagccagtgcaggcgcacacgcagcaatgatcaactttgccaaatggcgcagccgaatcgacgtcccgcagcaaactcacgacaccttaaaacagctggcgaagaaatggccgctggtggcgatcaccaacggtaacgcccagccggagctgtttggtttgggggattattttgagtttgtgctgcgcgctggcccgcacgggcgcagtaaaccgttcagcgatatgtactttttggctgcggaaaaactcaacgtgccgatcggcgagatcttacatgttggggacgatctcaccactgacgtgggtggggcaattcgcagcggaatgcaggcttgttggatcagaccggaaaatggcgatctgatgcaaacctgggacagccgtttactgccgcatctggaaatttcccggttggcatctctgaccagcctgatataatcagcaaatctgtatatatacccagctttttggcggagggcgttgcgcttctccgcccaacctatttttacgcggcggtgccaatggacgtttcttacctgctcgacagccttaatgacaaacagcgcgaagcggtggccgcgccacgcagcaaccttctggtgctggcgggcgcgggcagtggtaagacgcgcgtactggtgcatcgtatcgcctggttgatgagcgtggaaaactgcagcccatacagcattatggcggtgacgtttaccaacaaagcggcggcggagatgcgtcatcgtatcgggcaactgatgggcacgagccagggcggtatgtgggtcggcaccttccacgggctggcgcaccgtttgctgcgtgcgcaccatatggacgccaatctgccgcaggatttccagatcctcgacagtgaagaccagctacgcctgcttaagcgtctgatcaaagccatgaacctcgacgagaagcagtggccgccgcggcaggcaatgtggtacatcaacagccagaaagatgaaggcctgcgtccgcatcatattcaaagctacggtaatccggtggagcagacctggcagaaggtgtatcaggcgtatcaggaagcgtgtgaccgcgcgggcctggtggacttcgccgagctgctgctgcgcgctcacgagttgtggcttaacaagccgcatatcctgcaacactaccgcgaacgttttaccaatatcctggtggacgaattccaggataccaacaacattcagtacgcgtggatccgcctgctggcgggcgacaccggcaaagtgatgatcgtcggtgatgacgaccagagtatctacggctggcgcggggcgcaggtggagaatattcagcgtttccttaatgatttccccggtgccgaaactattcgtctggagcaaaactaccgctctaccagcaatattctgagcgccgctaacgccctgattgaaaacaataacgggcgtctgggtaaaaaactgtggaccgatggcgcggacggtgagcctatttccctctattgcgcttttaacgaactcgatgaagcgcgttttgtggttaaccgcatcaaaacctggcaggacaacggcggagcgcttgccgagtgcgccattctctaccgcagcaacgcccagagccgggtgctcgaagaggcgttattgcaggccagtatgccgtaccgtatttacggcgggatgcgcttcttcgaacgccaggaaatcaaagatgcgctcagctatctgcgcctgattgccaaccgcaacgacgacgcggcctttgagcgtgtggtgaatacgccaacgcggggtattggtgaccggacgctggacgtggtacgtcagacaagccgcgatcgccagttaacactctggcaggcatgtcgtgagctgttgcaggaaaaagccctcgccgggcgagctgccagcgccttgcagcgatttatggaattaatcgacgccttagcgcaggaaactgccgatatgccgctgcatgtacagactgaccgggtaattaaagactccggcctgcgtaccatgtatgagcaggagaagggcgaaaaaggtcagacgcgtatcgaaaacttagaggaactggtgacggcaacgcgccagttcagctacaacgaagaagacgaagatttaatgccgctgcaggcgttcctctcccatgcggcactggaagcaggtgaagggcaggcggatacctggcaggatgcggtgcagttgatgacgctacacagcgcgaaaggcctggagttcccgcaggtgtttatcgttggtatggaagagggcatgttcccaagccagatgagcctggatgaaggcgggcgtctggaagaagaacgccgtctggcctacgttggcgtaacccgcgcgatgcagaaactgacgctgacctacgcggaaacccgccgtctgtatggtaaagaggtttaccatcgcccgagccgctttatcggcgagctgccggaagagtgtgtggaagaggtgcgcctgcgcgccacggtaagccgcccggtcagccatcagcggatgggtacgccgatggtcgagaacgacagcggctacaagctcggccagcgcgtacgccacgctaagtttggtgaaggcaccattgtcaatatggaaggcagcggtgagcatagccgtttgcaggtggcatttcagggccagggtattaaatggctggtggcggcatacgcccggctggagagcgtgtaacgttgccggatgcggtgctgcgcaccttatttggcctaaaaaatcattcagattcaataaattgcaacgtcatgtaggccggatagggcgtttacgccgcatccggcatctgcgccatcttcagtatctgacacaaaactatcgttttaacctttccgctcgacggaaatcatggtgacaaaaggatagcgttgccacgggattgccccgcctttcatatacatatgactaatcgtgccatcaagataaagcagctgctcaacgttcagtttcgctttggcataacaggcaaaatcataaaaatttgttgcctgctggctcaacaaaaacacggcgttcccatgtttattaatcccaacaccgttacgaattttgctactggcgacgttgggatgaatacgcggattaattacaccgttttccatcaacattggcccactctgcaccgcaaactgaatctctttactggttttgaaggcatccagacgaacgatgccgactttatctcccgcgacataaaacacgccgccaggacggataaagaaattcccttcaccactagcgagatttaacgccaccttctgctgaccgttttcgatgtacaaaccgagcggcgcatagctttcatcatagatgccgccgttcatcgccatctgcacctgaccctgactattaatatccgccagcagagcatgtaacgttccccacgcttcgccattggctttttgccagtacattttcacccgctctgtttgaggattaacggtatacgcctgtacggtcagcgtcggatcactgagtgcgcaatcatcagcggcaacagcaaacaagggaagtaaggtgagggcgagaaaaatccgtttgagattcaaggtgatcattcctttaccaatgagtagctgatgcgccattataggtcctggatgtgggatttttttatcctgttagcgaccttgacgagtaccaaaaagcgcgaagttcaactattgttctgtggtgttctgttgcgtgttgacggcaaaattttgctggcgtaacatgcgcgcacgatcactctaagaggacattcgccttggacacacccagtagatactggctcactatcctgtcatccaggatcaactcctaaggctatccctttttgctgatagccttagcggttgtcagcgacctcaatttttcccgtcgcgctgagtcaggctgtttaatggtctgaaacccaatttgtttctgtgtgcccaccgaactgtccgatattttaagcattgggagtcccggtcatgctgagcgcatttcaactggaaaataaccgactgacccggctggaagtcgaagagagtcaaccccttgtaaatgcagtatggattgatcttgtcgaaccggacgacgacgagcgactgcgcgtacaatctgaacttggccagagcctggcaacccgcccggaactggaagacatcgaagcaagcgcacgtttctttgaagacgacgacggcctgcatattcactccttcttcttctttgaagatgcggaagatcacgccggtaactccactgtggcatttaccatccgtgatggtcgtctgtttactctgcgtgagcgtgaactgcccgcttttcgtctgtatcgtatgcgtgcccgtagccagagcatggtagacggtaacgcctacgagttgctgctggatctgttcgaaaccaaaatcgaacagttggcagatgaaattgaaaatatctatagcgacctggagcagttgagccgggtgattatggaagggcatcagggcgatgagtacgacgaggcgctctccactctggcggaactggaagatatcggctggaaagttcgcctgtgtctgatggatacccagcgcgcgctcaacttcctggtgcgtaaagcgcgtttaccgggtgggcaactggagcaggcgcgtgaaatcctgcgagatatcgaatccctgctgccgcataacgaatccctgttccagaaggtgaacttcctgatgcaggcggcaatgggttttatcaacatcgagcagaaccgcatcatcaaaatcttcagcgtggtatccgtggtattcctgccgccgacgctcgttgcttccagctatggcatgaactttgagtttatgccagaactgaagtggagcttcggctaccctggcgcgattatctttatgatcctcgcgggcctggcaccgtatctgtactttaagcggaagaactggttgtaaaaaacgagagcggtggcttagtctggctaagccacctgttattcaaaggctccaggtatttaacccttttacctctttctcatagaaccatttgttcgtgttaacagcaacataggctgctacggcaattcccagaatgttaacgccaattagtgcaccaacaaatagagatagaataccaagtaatagaactataattgcttttttccataaccccaggacaaataaatatatccaggaacagaagaaagcaatgaaattcatttgaatagttaagcgttgtcttacttttaatgctttaaatgctgctttatattctggtgttgccccccagaatccaggaaaaccatgttgatcataaaaattaaatcggtatttccatttttcacttaaactaccatcgttcatatattccttactcataaatactccataattattgtttactactatcagtaggtgcaagcattagcatactgaaagtggaaaaataacaaatcaaaaaaatcatgctaccattgccactacaggcaaaatcttcggctatcattgtgatgatagagatgatatatactgctaatgtaccaaaaacataagtttttatatagatgaaaccactatcacggagtcgctggcaattcatgttgatgacgagataatggagtacgatggtagagactataacaagaaagcctgcttctccatcgttaaaaaagataataagaaaggcaaaaatgaaatttattaaaataaaactaaatatataacgacgtctggaaatcttaccgttagatgttgggataaatatacgtaacataaattttacatccttgtatgagtctccggtcagcatggcaatatgcccactctcatgcaagagtcggcatattttttcagaatatatttattttttatttggacgttctacgctgcgtataaatcgcatccatcacaaaaattgccagcgccacccaaataaaggcgaaagtcaccatcttatcggcacccggtttttcaccataaaacgtcacagccagcaggaacatcagcgtcgggccaatgtactggaaaaagcctaacgtactgagacgcaagcgcgtggcagcggcggtaaaacacaacagcggtacggtagtgacaataccggcggcgatcagcagtaaattcaggctcatcgggttttgccccatatggctggtactgctgtcggcaatagcaaacaggtaaattgccgccacgggcagcagccacatggtttcgattaacatgccggtttgcgcttcaacggcaatcttcttgcgtaccagaccgtagaaggcaaaactaaatgccagtcccagcgcgataataggtaggctaccaaaagtccacagctggactaacacgccacatatcgccagaatcaccgccagccattgcatccggcggaatcgctcgccgaggaaaatcatccccagcacaatgttcaccagcgggttaataaagtaaccaaggctcgcttccagcatatggtgattgttcaccgcccagataaacagtagccagttgccaccaatcagcacggcagagactgccagcataaaaattttctgtggcgtctgaatcagcgtttttaaataggaccactggcggcaaatgctcatcagcaccaccataaagaaaaagctccagatcacgcgatgcgtcaggatttcatcggcgggcacgtagtaaatcaacttgaagtacgctggcgctataccccaaataaaataagcggcaagagcgagtaatacgccctgccgcgtttgttttgcatccatcgggaatactcatttttaattggtaacagcagtttacctgcttttatgtcttcaacctaccatataggtggcggtggcactggcaatataaagctgttcttcattgtgtaattcaacgcgggcgacggcgactttattgcctgcacgcaacaggctactagtagcagtaaaacgctcgcccctgcctgggcgcagataatcaacgcgaagatcaatggtccccatccggcttagccgctggcgtagttcatcttcactgatggtttcgtggcgggttaaggtacttcccacgcacaccagaccggcggcgacatccagcgcgctcgcaatgaccccgccgtgcaaaatgctttgcgcccagttgcccaccatcattggctgatttttaaaggccagctgtgcgaactctttttcgtaacgctccagttccatccccaatgcgcggttaaatggcatgtgataaacaaacatctcacccactaatttcagggcttgttcagcggtcagtacggcagacatatcatccttacacttcattggttaatgaaatgttgattttatgcttctttgttgttggtttctactttaggaagggataactaacggctatggagttaagtatgtaaaatagcccgcagaaaaatattcaccttatcaataattcgttacggagaacacgaccgatgcggactctgcagggctggttgttgccggtgtttatgttgcctatggcagtatatgcacaagaggcaacggtgaaagaggtgcatgacgcgccagcggtgcgtggcagtattatcgccaatatgctgcaggagcatgacaatccgttcacgctctatccttatgacaccaactacctcatttacacccaaaccagcgatctgaataaagaagcgattgccagttacgactgggcggaaaatgcgcgtaaggatgaagtaaagtttcagttgagcctggcatttccgctgtggcgtgggattttaggcccgaacagcgtgttgggtgcgtcttatacgcaaaaatcctggtggcaactgtccaatagcgaagagtctagtccgtttcgtgaaaccaactacgaaccgcaattgttcctcggttttgccaccgattaccgttttgcaggttggacgctgcgcgatgtggagatggggtataaccacgactctaacgggcgttccgacccgacctcccgcagctggaaccgcctttatactcgcctgatggcagaaaacggtaactggctggtagaagtgaagccgtggtatgtggtgggtaatactgacgataacccggatatcaccaaatatatgggttactaccagcttaaaatcggctatcacctcggtgatgcggtgctcagtgcgaaaggacagtacaactggaacaccggctacggcggcgcggagttaggcttaagttacccgatcaccaaacatgtgcgcctttatactcaggtttacagcggctatggcgaaagcctcatcgactataacttcaaccagacccgtgtcggtgtgggggttatgctaaacgatttgttttgatgaacggttgagtggttggcaaatctggaatccagcatccaggattaccctctcagagactaaaagcattgcagtttctcgcgcaggcgctgaaaatagcgcctgtttttatttcaggcaatcggggtgaatgtggcgcaggcggaagtgttgaatctggagtccggagctaaacaggttttacaagaaacctttggctaccaacagtttcgccccggccaggaagaaattatcgacactgtgctttccggccgcgattgcctcgtcgtcatgcccactggtggcggaaaatccctttgctatcaaatccctgccttattgctaaacggccttaccgtggttgttagtccgctgattagcttgatgaaagatcaggtggatcaactgcaagccaacggcgtggcggcggcgtgccttaacagcacgcaaacccgcgaacagcaacttgaagtgatgacaggctgccgcaccgggcaaattcgtctgctttatatcgccccggaacgcctgatgctggataactttcttgagcatctggcgcactggaatccggtgttattagccgttgatgaagcgcactgtatctcccaatggggccacgatttccgcccggaatatgccgcgctcggtcagttgcgccagcggttcccgacgctgccgtttatggcgctgaccgccacagccgacgacaccacgcgccaggatatcgtgcgcctgctggggctgaacgatccgctgattcaaatcagcagttttgaccgtccgaatattcgctacatgctgatggagaagttcaaaccgctcgatcagttgatgcgctacgtgcaggaacagcgcggtaagagtggcattatctactgcaacagccgcgcgaaagtagaagacaccgctgcgcgcctgcaaagcaagggaattagcgcggcggcctatcatgccgggctggaaaataatgttcgcgccgatgtgcaggaaaaattccagcgcgatgacctgcaaattgtggtggcgacggtggcgttcggcatgggcatcaataaaccaaacgttcgcttcgtggtccactttgatattccgcgcaatatcgaatcctattatcaggaaaccggacgcgccgggcgtgatggcctgcccgcggaagcgatgctgttttacgatccggctgatatggcgtggctgcgccgttgtctggaagagaagccgcaggggcagttgcaggatatcgagcgccacaaactcaatgcgatgggcgcgtttgccgaagcgcaaacttgccgtcgtctggtattgctgaactattttggcgaagggcgtcaggagccgtgcgggaactgcgatatctgcctcgatccgccgaaacagtacgacggtagtaccgatgctcagattgccctttccaccattggtcgtgtgaatcagcggtttgggatgggttatgtggtggaagtgattcgtggtgctaataaccagcgtatccgcgactatggtcatgacaaactgaaagtctatggcatgggccgtgataaaagccatgaacattgggtgagcgtgatccgccagctgattcacctcggcctggtgacgcaaaatattgcccagcattctgccctacaactgacagaggccgcgcgcccggtgctgcgcggcgaatcctctttgcaacttgccgtgccgcgtatcgtggcgctcaaaccgaaagcgatgcagaaaagcttcggcggcaactatgatcgcaaactgttcgccaaattacgcaaactgcgtaaaagcatagccgatgaaagtaatgtcccgccgtacgtggtgtttaacgacgcaaccttgattgagatggctgaacagatgccgatcaccgccagcgaaatgctcagcgttaacggcgttgggatgcgcaagctggaacgctttggcaaaccgtttatggcgctgattcgtgcgcatgttgatggcgatgacgaagagtaatcagcagcataaaaaagtgccagtatgaagactccgtaaacgtttcccccgcgagtcaaatgtatgttgatgttatttctcaccgtcgccatggtgcacattgtggcgcttatgagccccggtcccgatttcttttttgtctctcagaccgctgtcagtcgttcccgtaaagaagcgatgatgggcgtgctgggcattacctgcggcgtaatggtttgggctgggattgcgctgcttggcctgcatttgattatcgaaaaaatggcctggctgcatacgctgattatggtgggcggtggcctgtatctctgctggatgggttaccagatgctacgtggtgcactgaaaaaagaggcggtttctgcacctgcgccacaggtcgagctggcgaaaagtgggcgcagtttcctgaaaggtttactgaccaatctcgctaatccgaaagcgattatctactttggcagcgtgttcagtttgtttgtcggtgataacgttggcactaccgcgcgctggggcatttttgcgctgatcattgtcgaaacgctggcgtggtttaccgtcgttgccagcctgtttgccctgccgcaaatgcgccgtggttatcaacgtctggcgaagtggattgatggttttgccggggcgttatttgccggatttggcattcatttgattattagccggtgatgccagacgcgtcttcagagtaagtcggataaggcgtttacgccgcatccgacattatttttcacgcatgcctcgcgcttgctaacagcgctcccaccagcataaacaagctgccgaaaatcttattcagcgccttcatctgctttggtcctttaatccatagagcaatccgttgagcaagggtggcgtaaccgatcatcacaataatatcgaccacaatagtggtgacgccgagcacgatatactgcatcagttgcggctgttgcggcatgatgaattgcggaaatagcgccgccagaaacacaatacttttgggattggtgagattcacaaaaactgcgcgctggaacaaatgtcgacggctttgagtagaggccaggcttttaaggtcaattgcaccagcggcgcgccactgctggattcccagccaaatcaagtaagccgcgcctgcccacttcaacacttcaaacgcaatcacactgcgggaaaatagcgtccccaaccccacgccaaccagcacaatatgaatcgccagtccggtctgaagcccagcaatagacgccaccgcgccgcgataaccgtggttgaggctggtggtcatagtgttgattgcaccagagcctgggctcaggcttaaaatgatgcttgtcagcaggtaggcaaaccaccattctaaggtcatgatgaactcccggtgtgtctatttttgtgccacaatacgctactgtcgcagcgttgtgtcaggcacgctaaaaaaaacgattttacgtggtttaagaggcagattacccgatgtttcagcagcaaaaagactgggaaacaagagaaaacgcgtttgctgcttttaccatgggaccgctgactgatttctggcgtcagcgtgatgaagcagagtttactggtgtggatgacattccggtgcgctttgtccgttttcgcgcacagcaccatgaccgggtggtagtcatctgcccggggcgtattgagagctacgtaaaatatgcggaactggcctatgacctgttccatttggggtttgatgtcttaatcatcgaccatcgcgggcagggacgttccggtcgcctgttagccgatccgcatctcgggcatgttaatcgctttaatgattatgttgatgatctggcggcattctggcagcaggaggttcagcccggtccgtggcgtaaacgctatatactggcacatagcatgggcggtgcgatctccacattatttctgcaacgccatccaggtgtatgtgacgccattgcgctaactgcgccaatgtttgggatcgtgattcgtatgccgagttttatggcacggcagatcctcaactgggccgaagcgcatccacgtttccgtgatggctatgcaataggcaccgggcgctggcgcgcgttgccgtttgctatcaacgtactgacccacagcagacagcgatatcgacgtaacttacgcttctatgctgatgacccaacgattcgcgtcggtgggccgacctaccattgggtacgcgaaagtattctggctggcgaacaggtgttagccggtgcgggtgatgacgccacgccaacgcttctcttgcaggctgaagaggaacgcgtggtggataaccgcatgcatgaccgtttttgtgaactccgcaccgccgcgggccatcctgtcgaaggaggacggccgttggtaattaaaggtgcttaccatgagatcctttttgaaaaggacgcaatgcgcagtgtcgcgctccacgccatcgttgattttttcaacaggcataacagtcccagcggaaaccgctctacagaggtttaaatttcttatgtaccaggttgttgcgtctgatttagatggcacgttactttctcccgaccatacgttatccccttacgccaaagaaactctgaagctgctcaccgcgcgcggcatcaactttgtgtttgcgaccggtcgtcaccacgttgatgtggggcaaattcgcgataatctggagattaagtcttacatgattacctccaatggtgcgcgcgttcacgatctggatggtaatctgatttttgctcataacctggatcgcgacattgccagcgatctgtttggcgtagtcaacgacaatccggacatcattactaacgtttatcgcgacgacgaatggtttatgaatcgccatcgcccggaagagatgcgcttttttaaagaagcggtgttccaatatgcgctgtatgagcctggattactggagccggaaggcgtcagcaaagtgttcttcacctgcgattcccatgaacaactgctgccgctggagcaggcgattaacgctcgttggggcgatcgcgtcaacgtcagtttctctaccttaacctgtctggaagtgatggcgggcggcgttagtaaaggccatgcgctggaagcggtggcgaagaaactgggctacagcctgaaggattgtattgcgtttggtgacgggatgaacgacgccgaaatgctgagcatggcggggaaaggctgcattatgggcagtgcgcaccagcgtctgaaagaccttcatcccgagctggaagtgattggtactaatgccgacgacgcggtgccgcattatctgcgtaaactctatttaagctaatcgttctttatttggtcagttgtcaacctgatacttcgctacaatggatacccgttaatcaaagagttttccattgtggcgctacttatcatcaccacgattctgtgggccttctcctttagcttttatggcgagtaccttgcggggcacgtcgatagctattttgcggtgctggtgcgcgttggcctggcggcactcgtttttctgccgtttctgcgtacccgtggcaatagcctgaaaacggtcggcctgtatatgctggtgggcgcgatgcagcttggcgtgatgtatatgctgagtttccgcgcttatctctacctgacggtttccgagctgctgctgttcaccgtgctgacgccgctctacatcacgctgatttatgacatcatgagtaagcgccgtctgcgctggggctatgcctttagcgccttgctggcggtgattggtgccgggattattcgctatgatcaggtcaccgaccatttctggactggcttgctgctggtgcaactctccaatatcacttttgccattggcatggtgggttacaaacgcctgatggaaactcgcccgatgccacagcataacgcctttgcgtggttctatcttggcgcgtttctggtggcagtgattgcatggttcttgctgggaaatgcgcagaaaatgccgcaaaccacgctgcaatggggcattctggtgtttcttggcgtggtggcttccgggattggctactttatgtggaactacggcgcgacgcaggtggacgccggaacgctgggcattatgaataatatgcacgttccggcagggctgctggtaaacctggctatctggcaccaacagccgcactggccaacgtttattacaggcgcgctggtgatcctggccagtctgtgggtgcatcgtaagtgggtcgctccgcgctctagtcaaacggcagatgatcgcaggcgtgattgcgcgctgagcgaataattacaggcgcgctggacttcctggcctcactgtgggtgcatcgtaagtgggtcgctccgcgctcttcacaaacggcagatgatcgcaggcgtgattgcgcgcactgcgaataaacgcttccgtaactggctgacgctgctcgccatcgcgcacggcggcgtacagtcggctccacaagccttcgcccagggttttggtcaccaccagaccctggcgctcaaaactctctactacccaatgcggtagcgcggcaatacccatccgcgcggcaaccatctgaatcaacaataaggtgttatcgacgcttttcagactcgggctgacgcctgccggctgaagaaaatgccgccagacatccagtcgactacgctgcaccggataaattaatagcgtctcgctggcgagatcttccggtgtaattcgcgttttcgccgccagtggatggtcaggtgctaacaccagacgcacttcatagtcgaacatcgggctataatgcaggccactgcgcggcagaatatcggacgtcattaccagatccagctctccctgttgcaaggcgggctgcgggtcaaatgtcacgccgcttttaaaatccatctctacctgcggccagttcttatggaaattttctaacgcgggtgtcagccactgaatacagctatggcactcaatggcaatgcgcagacgcgtctgctgcggttcattgcaggcttgcagggcctggctaatttgcggcagtacctggtttgccagttgcaacaggatttctccctgcggtgtaaagcgtagcggctggctcttacgcacaaatagccggaagccaaggcgttgttccagatcgctaaactggtgagacagggcggattgcgtctgatgcaacgtcgccgcagcggctgcgaggctgccgcagttccgcaacgcttgtagcgttttcaggtgttttacttcgatcatgaaagtccttcacttcggcatgaataatttgcgcttgaggaatatacagtaaccgccaattatggatgtgtaaacatctggacggctaaaatccttcgtcttttaaatttatggtgcgttggctgcgtttctccaccccggtcacttacttcagtaagctcccggggatgaataaacttgccgccttccctaaattcaaaatccataggatttacatataattagaggaagaaaaaatgacaatattgaatcacaccctcggtttccctcgcgttggcctgcgtcgcgagctgaaaaaagcgcaagaaagttattgggcggggaactccacgcgtgaagaactgctggcggtagggcgtgaattgcgtgctcgtcactgggatcaacaaaagcaagcgggtatcgacctgctgccggtgggcgattttgcctggtacgatcatgtactgaccaccagtctgctgctgggtaacgttccggcgcgtcatcagaacaaagatggtagcgtagatatcgacaccctgttccgtattggtcgtggacgtgcgccgactggcgaacctgcggcggcagcggaaatgaccaaatggtttaacaccaactatcactacatggtgccggagttcgttaaaggccaacagttcaaactgacctggacgcagctgctggacgaagtggacgaggcgctggcgctgggccacaaggtgaaacctgtgctgctggggccggttacctggctgtggctggggaaagtgaaaggtgaacaatttgaccgcctgagcctgctgaacgacattctgccggtttatcagcaagtgctggcagaactggcgaaacgcggcatcgagtgggtacagattgatgaacccgcgctggtactggaactaccacaggcgtggctggacgcatacaaacccgcttacgacgcgctccagggacaggtgaaactgctgctgaccacctattttgaaggcgtaacgccaaatctcgacacgattactgcgctgcctgttcagggtctgcatgttgacctcgtacatggtaaagatgacgttgctgaactgcacaagcgcctgccttctgactggttgctgtctgcgggtctgatcaatggtcgtaacgtctggcgcgccgatcttaccgagaaatatgcgcaaattaaggacattgtcggcaaacgtgatttgtgggtggcatcttcctgcagcttgctgcacagccccatcgacctgagcgtggaaacgcgtcttgatgcagaagtgaaaagctggtttgccttcgccctacaaaaatgccatgaactggcactgctgcgcgatgcgctgaacagtggtgacacggcagctctggcagagtggagcgccccgattcaggcacgtcgtcactctacccgcgtacataatccggcggtagaaaagcgtctggcggcgatcaccgcccaggacagccagcgtgcgaatgtctatgaagtgcgtgctgaagcccagcgtgcgcgttttaaactgccagcgtggccgaccaccacgattggttccttcccgcaaaccacggaaattcgtaccctgcgtctggatttcaaaaagggcaatctcgacgccaacaactaccgcacgggcattgcggaacatatcaagcaggccattgttgagcaggaacgtttgggactggatgtgctggtacatggcgaggccgagcgtaatgacatggtggaatactttggcgagcacctcgacggatttgtctttacgcaaaacggttgggtacagagctacggttcccgctgcgtgaagccaccgattgtcattggtgacattagccgcccggcaccgattaccgtggagtgggcgaagtatgcgcaaagcctgaccgacaaaccggtgaaagggatgctgacggggccggtgaccatactctgctggagcttcccgcgtgaagatgtcagccgtgaaaccatcgccaaacagattgcgctggcgctgcgtgatgaagtggccgatctggaagccgctggaattggcatcatccagattgacgaaccggcgctgcgcgaaggtttaccgctgcgtcgtagcgactgggatgcgtatctccagtggggcgtagaggccttccgtatcaacgccgccgtggcgaaagatgacacacaaatccacactcacatgtgttattgcgagttcaacgacatcatggatagcattgcggcgctggacgcagacgtcatcaccatcgaaaccagccgttccgacatggagttgctggagagctttgaagagtttgattatccaaatgaaatcggtcctggcgtctatgacattcacagcccaaacgtaccgagcgtggaatggattgaagccttgctgaagaaagcggcaaaacgcattccggcagagcgcctgtgggtcaacccggactgtggcctgaaaacgcgcggctggccagaaacccgcgcggcactggcgaacatggtgcaggcggcgcagaacttgcgtcgggggtaaaatccaaaccgggtggtaataccacccggtcttttctcattacaggctcttcttcccaccatactgcttaaaccattccagcatacgctgccagccatcttctgcagatgcggcatgatagctcgggcgataatcagcgttgaatgcatgcccggcgtccgggtacacgataatctctgctttcgcattagcagcccgcagcgcctggcgcatggtttcaacgctctcctgcggaatgctgttatcctgaccaccatataagccgagaatcggcgcgttaagatcggttgcgatatcaacaggttgtttcggactattcaggctcttgtcgcccgtcagtttgccgtaccacgccactgcggcttttagctgtggattatgcgcggcatacagccaggtgatacgtccaccccagcagaatccggtgatcattaaacgatgaacatcgccgccgttgcgggaagcccaactggcgacatgatcgagatcggccagcacctggctgtcaggcacttttgctaccagaccgctaagcaacgtggggatatcggcaaaatcattcggatcgccttcgcggaagtaaagttcaggtgcgatagccagatacccctccagcgccagacggcgacaaatgtcgcggatatgttcatgcacgccaaaaatttcctgcactacaatgaccactggcagtgggccatcgctttgctttggtctggcatggtaagcaggcatgttatccccttgactagggatagaggtgaagcccgccacaatcgcgtcgtccggggtctgaacgatggtgctagcgagagggcttgcagcaggtgcaaatccagattgttgtgttgttgccatggtattctccgtacccttataaaaatgttgcgcaatgttaactatagtcagcatgcaacaaatcacattgcctgaatcggctcatcttttatgcagtcctgcagaatgaagggtgatttatgtgatttgcatcacttttggtgggtaaatttatgcaacgcatttgcgtcatggtgatgagtatcacgaaaaaatgttaaacccttcggtaaagtgtctttttgcttcttctgactaaaccgattcacagaggagttgtatatgtccaagtctgatgtttttcatctcggcctcactaaaaacgatttacaaggggctacgcttgccatcgtccctggcgacccggatcgtgtggaaaagatcgccgcgctgatggataagccggttaagctggcatctcaccgcgaattcactacctggcgtgcagagctggatggtaaacctgttatcgtctgctctaccggtatcggcggcccgtctacctctattgctgttgaagagctggcacagctgggcattcgcaccttcctgcgtatcggtacaacgggcgctattcagccgcatattaatgtgggtgatgtcctggttaccacggcgtctgtccgtctggatggcgcgagcctgcacttcgcaccgctggaattcccggctgtcgctgatttcgaatgtacgactgcgctggttgaagctgcgaaatccattggcgcgacaactcacgttggcgtgacagcttcttctgataccttctacccaggtcaggaacgttacgatacttactctggtcgcgtagttcgtcactttaaaggttctatggaagagtggcaggcgatgggcgtaatgaactatgaaatggaatctgcaaccctgctgaccatgtgtgcaagtcagggcctgcgtgccggtatggtagcgggtgttatcgttaaccgcacccagcaagagatcccgaatgctgagacgatgaaacaaaccgaaagccatgcggtgaaaatcgtggtggaagcggcgcgtcgtctgctgtaattctcttctcctgtctgaaggccgacgcgttcggccttttgtatttttgcgtagcgcctcgcaggaaatgcctttccaactggacgtttgtacagcacaattctattttgtgcgggtaagttgttgcgtcaggaggcgttgtggatttcagtatcatggtttacgcagttattgcgttggtgggtgtggcaattggctggctgtttgccagttatcaacatgcgcagcaaaaagccgagcaattagctgaacgtgaagagatggtcgcggagttaagcgcggcaaaacaacaaattacccaaagcgagcactggcgtgcagagtgcgagttactcaataacgaagtgcgcagcctgcaaagtattaacacctctctggaggccgatctgcgtgaagtaaccacgcggatggaagccgcacagcaacatgctgacgataaaattcgccagatgattaacagcgagcagcgcctcagtgagcagtttgaaaacctcgccaaccgtatttttgagcacagcaatcgccgggttgatgagcaaaaccgtcagagtctgaacagcctgttgagcccgctacgtgaacaactggacggtttccgccgtcaggttcaggacagcttcggtaaagaagcacaagaacgccataccctgacccacgaaattcgcaatctccagcaactcaacgcgcaaatggcccaggaagcgatcaacctgacgcgcgcgctgaaaggcgacaataaaacccagggcaactggggcgaggtagtattgacgcgggtgttggaggcttccggtctgcgtgaagggtatgaatatgaaacccaggtcagcatcgaaaatgacgcccgcagccggatgcagccggatgtcatcgtgcgcctgccgcagggaaaagatgtggtgatcgacgccaaaatgacgctggtcgcctatgaacgctattttaacgccgaagacgactacacccgcgaaagcgcgctacaggaacatatcgcgagcgtgcgtaaccatatccgtttgctgggacgcaaagattatcaacagctgccggggctgcgaactctggattacgtgctgatgtttattcccgttgaacccgcttttttactggcgcttgaccgccagccggagctgatcaccgaagcgttgaaaaacaacatcatgctggttagcccgactacgctgctggtggcgctgcgcactatcgccaacctgtggcgttatgagcatcaaagccgcaacgcccagcaaatcgccgatcgtgccagcaagctgtacgacaagatgcgtttgttcatcgatgacatgtccgcgattggtcaaagtctcgacaaagcgcaggataattatcggcaggcaatgaaaaaactctctagtgggcgcggaaatgtgctggcgcaggcagaagcgtttcgcggtttaggagtagaaattaaacgcgagattaatccggatttggctgaacaggcggtgagccaggatgaagagtatcgacttcggagcgttccggagcagccgaatgatgaagcttatcaacgcgatgatgaatataatcagcagagccgctaacccattgggagtagttaagccgggtagaaatctagggcatcgacgcccaatctgttacacttctggaacaattttttgatgagcaggcattgagatggtggataagagtcaagaaacgacgcactttggttttcagaccgtcgcgaaggaacaaaaagcggatatggtcgcccacgttttccattccgtggcaagtaaatacgatgtcatgaatgatttgatgagttttggtattcatcgtttgtggaagcgattcacgattgattgcagcggcgtacgccgtgggcagaccgtgctggatctggctggtggcaccggcgacctgacagcgaaattctcccgcctggtcggagaaactggcaaagtggtccttgctgatatcaatgaatccatgctcaaaatgggccgcgagaagctgcgtaatatcggtgtgattggcaacgttgagtatgttcaggcgaacgctgaggcgctgccgttcccggataacacctttgattgcatcaccattagctttggtctgcgtaacgtcaccgacaaagataaagcactgcgtagtatgtatcgcgtgctgaaacccggcggccgcctgctggtgcttgagttcagcaagccaattatcgagccgctgagcaaagcctatgatgcatactccttccatgtgctgccgcgtattggcagtctggtcgcgaacgacgccgacagctaccgttatctggcagaatccatccgtatgcatcccgatcaggataccctgaaagccatgatgcaggatgccggattcgaaagtgtcgactactacaatctgacggcaggggttgtggcgctgcatcgtggttataagttctgacaggagaccggaaatgccttttaaacctttagtgacggcaggaattgaaagtctgctcaacaccttcctgtatcgcagtcccgcgctgaaaacggcccgcagccgtctgctgggtaaagtattgcgcgtggaggtaaaaggctttagcacgagtttgattctggtgttcagcgaacgccaggttgatgtactgggcgaatgggcaggcgatgctgactgcaccgttatcgcctacgccagtgtgttgccgaaacttcgcgatcgccagcagcttaccgcactgattcgcagtggtgagctggaagtgcagggcgatattcaggtggtgcaaaacttcgttgcgctggcagatctggcagagttcgaccctgcggaactgctggccccttataccggtgatatcgccgctgaaggaatcagcaaagccatgcgcggaggcgcaaagttcctgcatcacggcattaagcgccagcaacgttatgtggcggaagccattactgaagagtggcgtatggcacccggtccgcttgaagtggcctggtttgcggaagagacggctgccgtcgagcgtgctgttgatgccctgaccaaacggctggaaaaactggaggctaaatgacgccaggtgaagtacggcgcctatatttcatcattcgcacttttttaagctacggacttgatgaactgatccccaaaatgcgtatcaccctgccgctacggctatggcgatacagtttattctggatgccaaatcggcataaagacaaacttttaggtgagcgactacgactggccctgcaagaactggggccggtttggatcaagttcgggcaaatgttaagtacccgccgcgatctttttccaccgcatattgccgatcagctggcgttattgcaggacaaagttgctccgtttgatggcaagctggcgaagcagcagattgaagctgcaatgggcggcttgccggtagaagcgtggtttgacgattttgaaatcaagccgctggcttctgcttctatcgcccaggttcataccgcgcgattgaaaagcaatggtaaagaggtggtgattaaagtcatccgcccggatattttgccggttattaaagcggatctgaaacttatctaccgtctggctcgctgggtgccgcgtttgctgccggatggtcgccgtctgcgcccaaccgaagtggtgcgcgagtacgaaaagacattgattgatgaactgaatttgctgcgggaatctgccaacgccattcagcttcggcgcaattttgaagacagcccgatgctctacatcccggaagtttaccctgactattgtagtgaagggatgatggtgatggagcgcatttacggcattccggtgtctgatgttgcggcgctggagaaaaacggcactaacatgaaattgctggcggaacgcggcgtgcaggtgttcttcactcaggtctttcgcgacagctttttccatgccgatatgcaccctggcaacatcttcgtaagctatgaacacccggaaaacccgaaatatatcggcattgattgcgggattgttggcagcctaaacaaagaagataaacgctatctggcagaaaactttatcgccttctttaatcgcgactatcgcaaagtggcagagctacacgtcgattctggctgggtgccaccagataccaacgttgaagagttcgaatttgccattcgtacggtctgtgaacctatctttgagaaaccgctggccgaaattagctttggacatgtactgttaaatctgtttaatacggcgcgtcgcttcaatatggaagtgcagccgcaactggtgttactccagaaaaccctgctctacgtcgaaggggtaggacgccagctttatccgcaactcgatttatggaaaacggcgaagcctttcctggagagctggattaaagatcaggtcggtattcctgcgctggtgagagcatttaaagaaaaagcgccgttctgggtcgaaaaaatgccagaactgcctgaattggtttacgacagtttgcgccagggcaagtatttacagcacagtgttgataagattgcccgcgagcttcagagtaatcatgtacgtcagggacaaagccgttattttctcggaattggcgctacgttagtattaagtggcacattcttgttggtcagccgacctgaatgggggctgatgcccggctggttaatggcaggtggtctgatcgcctggtttgtcggttggcgcaaaacacgctgattttttcatcgctcaaggcgggccgtgtaacgtataatgcggctttgtttaatcatcatctaccacagaggaacatgtatgggtggtatcagtatttggcagttattgattattgccgtcatcgttgtactgctttttggcaccaaaaagctcggctccatcggttccgatcttggtgcgagcatcaaaggctttaaaaaagcaatgagcgatgatgaaccaaagcaggataaaaccagtcaggatgctgattttactgcgaaaactatcgccgataagcaggcggatacgaatcaggaacaggctaaaacagaagacgcgaagcgccacgataaagagcaggtgtaatccgtgtttgatatcggttttagcgaactgctattggtgttcatcatcggcctcgtcgttctggggccgcaacgactgcctgtggcggtaaaaacggtagcgggctggattcgcgcgttgcgtagtctggcgacaacggtgcagaacgaactgacccaggagttaaaactccaggagtttcaggacagtctgaaaaaggttgaaaaggcgagcctcactaacctgacgcccgaactgaaagcgagcatggatgaactacgccaggccgcggagagcatgaagcgttcctacgttgcaaacgatcctgaaaaggcgagcgatgaagcgcacaccatccataacccggtggtgaaagataatgaagctgcgcatgagggcgtaacgcctgccgctgcacaaacgcaggccagtagcccggaacagaagccagaaaccacgccagagccggtggtaaaacctgctgcggacgctgaaccgaaaaccgctgcaccttcccctagcagcagtgataaaccgtaaacatgtctgtagaagatactcaaccgcttatcacgcatctgattgagctgcgtaagcgtctgctgaactgcattatcgcggtgatcgtgatattcctgtgtctggtctatttcgccaatgacatctatcacctggtatccgcgccattgatcaagcagttgccgcaaggtagtacgatgatcgccaccgacgtggccagcccgttctttacgccgatcaagctgacctttatggtgagcctgattctgagtgcgccggtgattctctatcaggtgtgggcatttatcgccccagcgctgtataagcatgaacgtcgcctggtggtgccgctgctggtttccagctctctgctgttttatatcggcatggcattcgcctactttgtggtctttccgctggcatttggcttccttgccaataccgcgccggaaggggtgcaggtatccaccgacatcgccagctatttaagcttcgttatggcgctgtttatggcgtttggtgtctcctttgaagtgccggtagcaattgtgctgctgtgctggatggggattaccagcccagaagacttacgcaaaaaacgcccgtatgtgctggttggtgcattcgttgtcgggatgttgctgacgccgccggatgtcttcagccaaacgctgttggcgatcccgatgtactgtctgtttgaaatcggtgtcttcttcagtcgcttttacgttggtaaagggcgaaatcgggaagaggaaaacgacgctgaagcagaaagcgaaaaaactgaagaataaattcaaccgcccgtcagggcggttgtcatatggagtacaggatgtttgatatcggcgttaatttgaccagtagccaatttgcgaaagaccgtgatgatgttgtagcgtgcgcttttgacgcgggagttaatgggctactcatcaccggcactaacctgcgtgaaagccagcaggcgcaaaagctggcgcgtcagtatagctcctgttggagtacggcgggcgtacatcctcacgacagcagccagtggcaagctgcgactgaagaagcgattattgagctggccgcgcagccagaagtggtggcgattggtgaatgtggtctcgactttaaccgcaactttagcacgccggaagagcaggaacgcgcttttgttgcccagctacgcattgccgcagatttaaacatgccggtatttatgcactgtcgcgatgcccacgagcggtttatgacattgctggagccgtggctggataaactgcctggtgcggttcttcattgctttaccggcacacgcgaagagatgcaggcgtgcgtggcgcatggaatttatatcggcattaccggttgggtttgcgatgaacgacgcggactggagctgcgggaacttttgccgttgattccggcggaaaaattactgatcgaaactgatgcgccgtatctgctccctcgcgatctcacgccaaagccaagttcccggcgcaacgagccagcccatctgccccatattttgcaacgtattgcgcactggcgtggagaagatgccgcatggctggctgccaccacggatgctaatgtcaaaacactgtttgggattgcgttttaaagtttgcggaactcggtattcttcacactgtgcttaatctctttattaataagattaagcaatagcatggagcgagcctcaccatcgggttcggtgaaaatggcctgaaagccttcgaacgcgccttcggtaataatcaccttatcacccggataaggggttgccggatcgacaatgtctttcggtttatatacgcttagctgatgaataaccgcgcttgggactatcgctgggctcgcgccaaagcgcacgaagtggctgacaccgcgggtcgcgttgatagtcgtggtatgaatcacttctgggtcaaattccacaaacaggtagttggggaacaatggctcactgactgcagtacgttttccacgcacgattttttccagggtgatcatcggtgccaggcaattcacagcctgtctttcgaggtgttcctgggcacgttgaagttgcccgcgcttgcagtacagtaaataccaggattgcataatgactcttatccgtttaatcggggcgcaaggatagcaaaagctttacgctaagttaattatattccccggtttgcgttataccgtcagagttcacgctaatttaacaaatttacagcatcgcaaagatgaacgccgtataatgggcgcagattaagaggctacaatggacgccatgaaatataacgatttacgcgacttcttgacgctgcttgaacagcagggtgagctaaaacgtatcacgctcccggtggatccgcatctggaaatcactgaaattgctgaccgcactttgcgtgccggtgggcctgcgctgttgttcgaaaaccctaaaggctacagtatgccggtgctgtgcaacctgttcggtacgccaaagcgcgtggcgatgggcatggggcaggaagatgttagcgcgctgcgtgaagttggtaaattattggcgtttctgaaagagccggagccgccaaaaggtttccgcgacctgtttgataaactgccgcagtttaagcaagtattgaacatgccgacaaagcggctgcgtggtgcgccctgccaacaaaaaatcgtctctggcgatgacgtcgatctcaatcgcattcccattatgacctgctggccggaagatgccgcgccgctgattacctgggggctgacagtgacgcgcggcccacataaagagcggcagaatctgggcatttatcgccagcagctgattggtaaaaacaaactgattatgcgctggctgagccatcgcggcggcgcgctggattatcaggagtggtgtgcggcgcatccgggcgaacgtttcccggtttctgtggcgctgggtgccgatcccgccacgattctcggtgcagtcactcccgttccggatacgcttagtgagtatgcgtttgccggattgctacgtggcaccaagaccgaagtggtgaagtgtatctccaatgatcttgaagtgcccgccagtgcggagattgtgctggaagggtatatcgaacaaggcgaaactgcgccggaagggccgtatggcgaccacaccggttactataatgaagtcgatagtttcccggtatttaccgtgacgcatattacccagcgtgaagatgcgatttaccattccacctataccgggcgtccgccagatgagcccgcggtgctgggtgtcgcactgaacgaagtgtttgtgccgattctgcaaaaacagttcccggaaattgtcgatttttacctgccgccggaaggctgctcttatcgcctggcggtagtgacaatcaaaaaacagtacgccggacacgcgaagcgcgtcatgatgggcgtctggagcttcttacgccagtttatgtacactaaatttgtgatcgtttgcgatgatgacgttaacgcacgcgactggaacgatgtgatttgggcgattaccacccgtatggacccggcgcgggatactgttctggtagaaaatacgcctattgattatctggattttgccagccctgtctccgggctgggtagtaaaatggggctggatgccacgaataaatggccgggggaaacccagcgtgaatggggacgtcccatcaaaaaagatccagatgttgtcgcgcatattgacgccatctgggatgaactggctatttttaacaacggtaaaagcgcctgatgcgcgtttgttttgccctatttatcgatccgacagagaaagcgcatgacaaccttaagctgtaaagtgaccagcgtagaagctatcacggataccgtatatcgtgtccgcatcgtgccagacgcggccttttcttttcgtgctggtcagtatttgatggtagtgatggatgagcgcgacaaacgtccgttcagtatggctagcacgccggatgaaaaagggtttatcgagctgcatattggcgcttctgaaatcaacctttacgcgaaagcagtcatggaccgcatcctcaaagatcatcaaatcgtggtcgacattccccacggagaagcgtggctgcgcgatgatgaagagcgtccgatgattttgattgcgggcggcaccgggttctcttatgcccgcagcattttgctgacagcgttggcgcgtaacccaaaccgtgatatcaccatttactggggcgggcgtgaagagcagcatctgtatgatctctgcgagcttgaggcgcttagcttgaagcatcctggtctgcaagtggtgccggtggttgaacaaccggaagcgggctggcgtgggcgtactggcaccgtgttaacggcggtattgcaggatcacggtacgctggcagagcatgatatctatattgccggacgttttgagatggcgaaaattgcccgcgatctgttttgcagtgagcgtaatgcgcgggaagatcgcctgtttggcgatgcgtttgcatttatctgagatataaaaaaacccgcccctgacaggcgggaagaacggcaactaaactgttattcagtggcatttagatctatgacgtatctggcaaaccatgcccgatgcgacgctgtcgcgtcttatcgtgcctacaaatagtccgaaccgtaggccggataaggcgtttacgccgcatccggcaattggtgcatgatgcctgatgcgacgctgtcgcgtcttatcgtgcctacaaatagtccgaaccgtaggccggataaggcgtttacgccgcatccggcaattggtgcatgatgcctgatgcgacgctggcgcgtcttatcaggcctacattggtgccggatcggtagaccggataaggcgttcacgccgcatccggcaagtggttaaacccgctcaaacaccgtcgcaataccctgacccagaccgatacacatcgtcgccagaccaaactgaacgtctttgcgttccatcagattcagcagcgtggtgctgatacgcgcaccggaacaacccagcggatgacccagcgcgatcgcgccaccgttgaggttgatcttctcgtcaatctgctcaattagtcccagatctttaatacatggcaggatctgcgcggcaaaggcttcgttcatttcaaacacgccgatatcgctggcagaaagccccgcttttttcagcgccagtttgctggccggaaccgggccgtaacccataatgcttgggtcacaaccaacgaccgccatgctacgcacacgagcgcgcggcttaagacctaattcatgggcgcggctttcactcatcaccagcatggcagctgcgccatcggaaagtgcagaagatgtgcccgccgttaccataccgtttactggatcaaacgccggacgcagcgtggcgagggcttccacggtggtttccgggcgaatcacttcgtcgtaattaaactgcttcaggacgccgtcggcatcgtgaccaccggtcgggatgatttcatttttaaatgcggcgctctgcgtggcggcccaggcgcgggcgtgactccgcgcggcaaaggcatcctgcatttcacggctgataccgtgcatacgcgccagcatttctgccgttaagcccatcatgcccgccgctttggcgacattgcggctcaggccggggtgaaaatcgacgccgtgactcatcggcacatggcccatatgctccacgccgccaaccagacatgcctgcgcatcgccagtcatgatcattcgtgctgcgtcatgcagtgcctgcatggaactaccacacaagcgattaacggtaaccgccgggacagagtgtggtacttctgccagcagcgccgcgttacgggcgatattaaaaccctgctccagcgtctgctgcacacaaccccagtaaatatcgtcgagggccgccgcttccagcgccgggttacgcgccagcaggctacgcattaaatgagcggagagatcttctgcacgcacgttacgaaaagcaccgcccttgctacggcccatcggggtgcgaattgcatcgacaatgacaacctgttccattgtgactccttaagccgttttcaggtcgccaaccggacgggctggctcaaccggaggatagtacggttcgttatgacgcgctttattacgcagaccttccggcacttcatacagcgggccgaggtgctgatattgctgtgccatatcgaggtattttgcgctaccgagggtgtccagccagcggaacgcgccgccgtggaacggagggaagcccaggccgtagaccagcgccatatccgcttccgccggagtggcgataatgccttcctccagacagcgcaccacttcgttgaccatcgggatcatcatgcgggcgataatctcttcttcgctgaaatcgcgcttcggctggctcacttctgccagcaggtcttcaacggcggcgtcttcttctttcttcggcttacctttgctgtcttctttataacgccagaaaccgaggccgttcttctgaccaaagcggttggcatcaaacagcgcgtcgatggcatcgcggtaatctttctgcatccgctgcgggaagcctgctgccatgacagcctgagcgtgatgcgcggtatcaatgcccacaacgtccagcagatatgccgggcccatcggccagccaaactgtttttccatcactttgtcgatcttgcggaaatccgcgccgtcgcgcagcagctggctgaaaccggcgaaatacgggaacagcacgcggttaacaaagaagccggggcagtcgttaaccacaatcggcgtcttgcccatcttgctcgcccaggcgacaactttcgcgatggtttcgtcggagcttttctcgccgcgaataatttctaccaacggcattcggtggaccgggttaaagaagtgcatcccgcagaagttttccgggcgttccagcgcgttggccagttcgctgataggaatggtactagtgttagacgccagcacggtatcctggcgtactttttgttcggtttctgccagtacggcttttttcactttcgggttttcaacaaccgcttctaccacaatatccacgcggtcaaatccggcgtagtcgagcgttgggtggattgtggagatcacgccagccagtttcagaccatcgatcttgccgcgctcaagctgcttgttcagcagtttcgcggcttcggtcatgccgagggttaagctcttgtcgttgatatctttcatgacaaccggcacgcctttccacgcagactggtaagcgatgccgccgcccataatgcctgcacccagcaccgcggcctgtttcggggtttcaacgtctttggtgagtttcttcgctttgccttttacatattgatcgttaaggaaaatgccgaccagtgcgcgggcttcgttggtatgcgccagcgggacaaaacttttgttttccaggtttaaggcttcttcacgaccaaaacgggccgcagcttcaatggtttttactgcggtgatgggggccggataatgtttccccgctgtttgtgcgaccatccctttagcgatggtgaagctcatggtggcttcaatcttgctcagttttagtggttccagcttcggctgacgttttgctttccagtcgaggtcgccgttaatggcctggcgtaaaaccgcctttgcgccttcaaccagtttttctgctttgactacgccatccaccagaccgattttcagcgcctgatccgcgccgacatctttaccggcggcaatgatttccagcgcactgtcagcgcccagcatacgtggcatacgtacagaaccgccaaagccaggcatgatgcccagtttggtttccggcagaccgatgcgcagatccggcgtcgccagacgataatcggtcgccagcacgcattcgcagccaccgcccagcgcatagccattgacggcagcaatggtcggcaccggcagatcttccaggcgattaaacacgctattggcaaagtgcagccactgacttaactgttcttcaggaacgaggaacagggacaaaaattcggtgatatcagcaccgacgataaaggctgctttgttgctacgcagcagcagcccttttagatcactttgctgttccagcacgccgatggcctcgccgaggctggcgacggtcgcagtgtcgagtttattaacactacctggggcatcaaataccagttcggcaatgccatcttccagccagtcaaggtacagggtgtcgcctttgtaaagcatgtcagtctcctgaatccgcaaggtgatctggtcgtaccagatgagtcgaagtgtgtattttgtgttaaaaatatgcaaacaaaagattaaagaaatgccgatctgatcacgctcggcagaaatcacgctctggatgaacgatgtgctaagatgcggagacttaaggtcaaaaaaacagaagggtaaaaaatggaaagtctggccagcctctataaaaatcatatagctaccttacaagaacggactcgcgatgcgctggcgcgcttcaagctggatgcgttacttattcactccggcgagctgttcaatgtttttctcgacgatcatccctatccgtttaaagtgaacccgcaattcaaagcgtgggtgccggtaactcaggtgccaaactgctggttgctggtggatggcgtgaacaagccgaaactgtggttctatctgccggttgattactggcacaacgtcgaaccgctgccgacctctttctggactgaagatgtggaagtgatcgcgctgccgaaagccgatggcattggtagcctgctgcctgctgcgcgcggcaatatcggttatatcggtccggtgccggaacgtgcgctgcaactgggtattgaggccagcaacatcaacccgaaaggggttatcgactacctgcattactatcgctccttcaaaactgagtacgaactggcctgtatgcgtgaagcgcagaaaatggcggtcaacggtcaccgcgcggcagaagaagcgttccgttctggcatgagcgagttcgatatcaacattgcctatctgaccgcgaccggtcatcgtgataccgacgtaccttacagcaacattgtggcgcttaacgaacacgctgcggtactgcattacaccaaactggaccatcaggcaccggaagagatgcgcagcttcctgctggatgccggggcagaatataacggctatgcggctgacctgacccgtacctggagcgcaaaaagtgacaacgactacgcgcagctggtgaaggacgttaatgatgaacaactggcgctgatcgccaccatgaaagcaggcgtcagctatgtggattaccacatccagttccatcagcgcatcgccaaactgctgcgtaaacatcaaatcatcaccgatatgagtgaagaagcgatggtcgaaaacgatcttaccgggccgtttatgccgcatggtatcggccatccgctgggcctgcaggtgcatgacgtcgctggttttatgcaggatgatagcggtacgcacctcgcggcaccggcaaaatatccgtacctgcgctgcacccgtattctccagccgggcatggtgttaaccatcgaaccgggtatctacttcatcgaaagcctactggcaccgtggcgtgaagggcagttcagcaagcacttcaactggcagaaaattgaagcactgaaaccgttcggcggcattcgtatcgaagacaacgtggtgatccacgaaaacaacgtggaaaacatgacccgggatctgaaactggcgtgatggaaagctggttaattcctgcggcaccggtcacggtcgttgaagagatcaaaaagagccgcttcataacgatgttggcgcataccgatggcgttgaggcggcgaaagcgtttgttgaaagcgtgcgggcagaacaccccgatgcccggcaccattgcgtggcgtgggtcgcgggtgcgccggatgattctcaacagctgggtttctctgacgacggggagccggcgggaacggcaggtaaaccgatgctcgcccagctaatgggcagcggcgtcggggaaattaccgctgtggtagtgcgctactacggcggcatattgcttggcaccggtgggttagtgaaagcgtatggcggcggcgtgaatcaggcgctgcgccagctaacgacccaacgcaagacgccattaaccgaatatactttgcaatgtgaatatcatcagttaaccggcattgaagcgttgctggggcagtgtgacggcaaaattatcaacagtgattatcaggcattcgttctgctgcgggtggcgcttccggcggcgaaagtggctgaattttccgcaaagctggcggattttagccgtggtagtttgcaattgttagcgattgaagaataatccccacttcgttttgcagaactaaggaagcggcagagatgcattttcgcgccattacccgaatcgttggactactggtcatcttatttagtgggaccatgattatccctgggctggtagcactcatctaccgggatggagcgggccgcgcttttacccagaccttttttgtcgccctcgccattggctctatgctgtggtggccgaaccgcaaagagaaaggcgaacttaaatcccgtgaggggtttctgatagtggtgctgttctggaccgtgctgggtagcgtcggtgcgctcccttttatcttcagcgaaagcccgaacctcacgattaccgatgcgttttttgaatctttctctggcctgaccactacgggagccactacgctggtggggctggatagcctccctcacgccatcctcttttatcgccagatgctgcaatggtttggcgggatggggatcatcgtgttggcggttgcgatactgcctatcctcggcgtgggtgggatgcagctctatcgcgcagaaatgcccggcccgctgaaagataacaaaatgcgcccgcgaattgcggaaacggcgaaaaccctgtggttgatttatgtcttgctgaccgtcgcctgtgcgctggcgttgtggtttgccggaatggatgcctttgatgccatcggccatagctttgcgactatcgctattggcggcttcagcacacatgatgccagtatcggttatttcgatagcccgactattaacactatcattgctatcttcctgctgatctccggctgtaactacggtctgcactttagtctgttaagtgggcgtagtctgaaggtttattggcgcgatccggaatttcgcatgtttatcggcgtacagtttacgctggtggttatttgtaccctcgtactgtggtttcataatgtctacagtagcgcgctgatgacaattaaccaggcgtttttccaggtggtgagcatggcgacaaccgccgggtttacaactgacagcattgcccgctggccgctctttttgccggtactgcttttatgtagtgcctttatcggcggttgcgccgggagtacgggcggtggcctgaaggtgatccgcatcctgctgctgtttaagcaggggaaccgtgagctgaaacgactggtgcatccgaacgccgtctatagcattaagctggggaatcgcgcactgccggaacgtatcctcgaagccgtttggggatttttctccgcctatgcattggtgtttattgtcagtatgctggcgattatcgccacgggcgtggatgacttttctgcctttgcgagcgttgttgcgacattgaataacctggggccagggcttggcgtggttgctgataactttaccagtatgaacccggtggctaaatggatcctgattgccaacatgctgtttggtcgtctcgaggtctttacattgctggtgctctttaccccgactttctggcgtgaatgatggagtaatacgtgaaaacattaattcttttcagtacaagggacggacaaacgcgcgagattgcctcctacctggctagcgaactgaaagaactggggatccaggcggatgtcgccaatgtgcaccgcattgaagaaccacagtgggaaaactatgaccgtgtggtcattggtgcttctattcgctatggtcactaccatagtgcgttccaggaatttgtcaaaaaacatgcgacgcggctgaatagcatgccgagcgccttttactccgtgaatctggtggcgcgcaaaccggagaagcgtactccacagaccaacagctacgcgcgcaagtttctgatgaacagccaatggcgtcccgatcgctgcgcggtcattgccggggcgctgcgttacccacgttatcgctggtacgaccgttttatgatcaagctgattatgaagatgagtggcggtgaaacggatacgcgcaaagaagttgtctataccgattgggagcaggtggcgaatttcgcccgagaaatcgcccatttaaccgacaaaccgacgctgaaataagcataaagaataaaaaatgcgcggtcagaaaattattttaaatttcctcttgtcaggccggaataactccctataatgcgccaccactgacacggaacaacggcaaacacgccgccgggtcagcggggttctcctgagaactccggcagagaaagcaaaaataaatgcttgactctgtagcgggaaggcgtattatgcacaccccgcgccgctgagaaaaagcgaagcggcactgctctttaacaatttatcagacaatctgtgtgggcactcgaagatacggattcttaacgtcgcaagacgaaaaatgaataccaagtctcaagagtgaacacgtaattcattacgaagtttaattctttgagcgtcaaacttttaaattgaagagtttgatcatggctcagattgaacgctggcggcaggcctaacacatgcaagtcgaacggtaacaggaagaagcttgcttctttgctgacgagtggcggacgggtgagtaatgtctgggaaactgcctgatggagggggataactactggaaacggtagctaataccgcataacgtcgcaagaccaaagaggggtaccttcgggcctcttgccatcggatgtgcccagatgggattagctagtaggtggggtaacggctcacctaggcgacgatccctagctggtctgagaggatgaccagccacactggaactgagacacggtccagactcctacgggaggcagcagtggggaatattgcacaatgggcgcaagcctgatgcagccatgccgcgtgtatgaagaaggccttcgggttgtaaagtactttcagcggggaggaagggagtaaagttaatacctttgctcattgacgttacccgcagaagaagcaccggctaactccgtgccagcagccgcggtaatacggagggtgcaagcgttaatcggaattactgggcgtaaagcgcacgcaggcggtttgttaagtcagatgtgaaatccccgggctcaacctgggaactgcatctgatactggcaagcttgagtctcgtagaggggggtagaattccaggtgtagcggtgaaatgcgtagagatctggaggaataccggtggcgaaggcggccccctggacgaagactgacgctcaggtgcgaaagcgtggggagcaaacaggattagataccctggtagtccacgccgtaaacgatgtcgacttggaggttgtgcccttgaggcgtggcttccggagctaacgcgttaagtcgaccgcctggggagtacggccgcaaggttaaaactcaaatgaattgacgggggcccgcacaagcggtggagcatgtggtttaattcgatgcaacgcgaagaaccttacctggtcttgacatccacggaagttttcagagatgagaatgtgccttcgggaaccgtgagacaggtgctgcatggctgtcgtcagctcgtgttgtgaaatgttgggttaagtcccgcaacgagcgcaacccttatcctttgttgccagcggtccggccgggaactcaaaggagactgccagtgataaactggaggaaggtggggatgacgtcaagtcatcatggcccttacgaccagggctacacacgtgctacaatggcgcatacaaagagaagcgacctcgcgagagcaagcggacctcataaagtgcgtcgtagtccggattggagtctgcaactcgactccatgaagtcggaatcgctagtaatcgtggatcagaatgccacggtgaatacgttcccgggccttgtacacaccgcccgtcacaccatgggagtgggttgcaaaagaagtaggtagcttaaccttcgggagggcgcttaccactttgtgattcatgactggggtgaagtcgtaacaaggtaaccgtaggggaacctgcggttggatcacctccttaccttaaagaagcgttctttgaagtgctcacacagattgtctgatgaaaatgagcagtaaaacctctacaggcttgtagctcaggtggttagagcgcacccctgataagggtgaggtcggtggttcaagtccactcaggcctaccaaatttgcacggcaaatttgaagaggttttaactacatgttatggggctatagctcagctgggagagcgcctgctttgcacgcaggaggtctgcggttcgatcccgcatagctccaccatctctgtagtgattaaataaaaaatacttcagagtgtacctgcaaaggttcactgcgaagttttgctctttaaaaatctggatcaagctgaaaattgaaacactgaacaacgaaagttgttcgtgagtctctcaaattttcgcaacacgatgatgaatcgaaagaaacatcttcgggttgtgaggttaagcgactaagcgtacacggtggatgccctggcagtcagaggcgatgaaggacgtgctaatctgcgataagcgtcggtaaggtgatatgaaccgttataaccggcgatttccgaatggggaaacccagtgtgtttcgacacactatcattaactgaatccataggttaatgaggcgaaccgggggaactgaaacatctaagtaccccgaggaaaagaaatcaaccgagattcccccagtagcggcgagcgaacggggagcagcccagagcctgaatcagtgtgtgtgttagtggaagcgtctggaaaggcgtgcgatacagggtgacagccccgtacacaaaaatgcacatgctgtgagctcgatgagtagggcgggacacgtggtatcctgtctgaatatggggggaccatcctccaaggctaaatactcctgactgaccgatagtgaaccagtaccgtgagggaaaggcgaaaagaaccccggcgaggggagtgaaaaagaacctgaaaccgtgtacgtacaagcagtgggagcacgcttaggcgtgtgactgcgtaccttttgtataatgggtcagcgacttatattctgtagcaaggttaaccgaataggggagccgaagggaaaccgagtcttaactgggcgttaagttgcagggtatagacccgaaacccggtgatctagccatgggcaggttgaaggttgggtaacactaactggaggaccgaaccgactaatgttgaaaaattagcggatgacttgtggctgggggtgaaaggccaatcaaaccgggagatagctggttctccccgaaagctatttaggtagcgcctcgtgaattcatctccgggggtagagcactgtttcggcaagggggtcatcccgacttaccaacccgatgcaaactgcgaataccggagaatgttatcacgggagacacacggcgggtgctaacgtccgtcgtgaagagggaaacaacccagaccgccagctaaggtcccaaagtcatggttaagtgggaaacgatgtgggaaggcccagacagccaggatgttggcttagaagcagccatcatttaaagaaagcgtaatagctcactggtcgagtcggcctgcgcggaagatgtaacggggctaaaccatgcaccgaagctgcggcagcgacactatgtgttgttgggtaggggagcgttctgtaagcctgtgaaggtgtgctgtgaggcatgctggaggtatcagaagtgcgaatgctgacataagtaacgataaagcgggtgaaaagcccgctcgccggaagaccaagggttcctgtccaacgttaatcggggcagggtgagtcgacccctaaggcgaggccgaaaggcgtagtcgatgggaaacaggttaatattcctgtacttggtgttactgcgaaggggggacggagaaggctatgttggccgggcgacggttgtcccggtttaagcgtgtaggctggttttccaggcaaatccggaaaatcaaggctgaggcgtgatgacgaggcactacggtgctgaagcaacaaatgccctgcttccaggaaaagcctctaagcatcaggtaacatcaaatcgtaccccaaaccgacacaggtggtcaggtagagaataccaaggcgcttgagagaactcgggtgaaggaactaggcaaaatggtgccgtaacttcgggagaaggcacgctgatatgtaggtgaagcgacttgctcgtggagctgaaatcagtcgaagataccagctggctgcaactgtttattaaaaacacagcactgtgcaaacacgaaagtggacgtatacggtgtgacgcctgcccggtgccggaaggttaattgatggggttagccgcaaggcgaagctcttgatcgaagccccggtaaacggcggccgtaactataacggtcctaaggtagcgaaattccttgtcgggtaagttccgacctgcacgaatggcgtaatgatggccaggctgtctccacccgagactcagtgaaattgaactcgctgtgaagatgcagtgtacccgcggcaagacggaaagaccccgtgaacctttactatagcttgacactgaacattgagccttgatgtgtaggataggtgggaggctttgaagtgtggacgccagtctgcatggagccgaccttgaaataccaccctttaatgtttgatgttctaacgttgacccgtaatccgggttgcggacagtgtctggtgggtagtttgactggggcggtctcctcctaaagagtaacggaggagcacgaaggttggctaatcctggtcggacatcaggaggttagtgcaatggcataagccagcttgactgcgagcgtgacggcgcgagcaggtgcgaaagcaggtcatagtgatccggtggttctgaatggaagggccatcgctcaacggataaaaggtactccggggataacaggctgataccgcccaagagttcatatcgacggcggtgtttggcacctcgatgtcggctcatcacatcctggggctgaagtaggtcccaagggtatggctgttcgccatttaaagtggtacgcgagctgggtttagaacgtcgtgagacagttcggtccctatctgccgtgggcgctggagaactgaggggggctgctcctagtacgagaggaccggagtggacgcatcactggtgttcgggttgtcatgccaatggcactgcccggtagctaaatgcggaagagataagtgctgaaagcatctaagcacgaaacttgccccgagatgagttctccctgactccttgagagtcctgaaggaacgttgaagacgacgacgttgataggccgggtgtgtaagcgcagcgatgcgttgagctaaccggtactaatgaaccgtgaggcttaaccttacaacgccgaaggtgttttggcggattgagagaagattttcagcctgatacagattaaatcagaacgcagaagcggtctgataaaacagaatttgcctggcggcagtagcgcggtggtcccacctgaccccatgccgaactcagaagtgaaacgccgtagcgccgatggtagtgtggggtctcctcatgcgagagtagggaactgccaggcatcaaataaaacgaaaggctcagtcggaagactgggcctttcgttttatctgttgtttgtcggtgaacgctctcctgagtaggacaaatccgccgggagcggatttgaacgttgcgaagcaacggcccggagggtggcgggcaggacgcccgccataaactgccaggcatcaaattaagcagaaggccatcctgacggatggcctttttgcattggcgcagaaaaaaatgccggatgcgacgctggcgcgtcttatccagcctactcttgcttatccgttctgcttttgcatccactccaccacaaaatcagccagcccctcaacatcattaatatccagtaatgcgacatcaagattaagcggcacatcactggctacagcaataacatgcctgtctatcactaattcttcaggtcgatgtccggctccatcgcgaaacagcacaatctttgcgatctcttcatgcttaaacccttcgaccagaatcaaatccagcttactggtatccattcgacttgcgagaaactgtagatccagctcttcttcgtctggtgtttccgtcatcaaggcccatcgttgctggctggcaacgatggtttgtaccgcgccagccttgcgcagctcatagctatctttgcctggcttatcaacatccatatcatggtgcgtatgcttaatcagccctggacggatccctctggcgcataatgccgggatcagttttttcaaaagcgtagtttttccggtaccactccacgcggcaaaggcgagtaacggtatcatcgtttttcctgccatcgggcaagctcctctggcgtattcacgttaacaaatgcatctttatgatcgctgaaatcaaccgcatgaccgccagccagacgcataaataccattacccggcgttctcctgcttgcagatattccagtaataaaggctcaatagcgcggtttaccagagcaatagtcgggtgatcgcgttcaccgtcatggacccacacgacaggcgcatctttgcgctgatgattaagcctggctgctaaatcagggggaatgtaaggcgtatcgcacgggcaaaacaaaaaccactcaccagcttcctgctgcattacactaagcattcctgccagagggcctgggtaatccgccagactatcttcaatcactttcagaccgcttgcctgatagatttcctgatgacgattagcattaaccacgacgtgagagagctgcgtcataagcgcgtcagcgacatgttgccataatggtttgccgtttaattcaagcaatcctttatctacgccgcccattcgtctggctttaccgcctgccagcacaacgcctgttatcgtcgtcatcagattcaccgatatcgcctcttttattgtgggattgaccctgctaacgtgtctgtctcaagagtaaggagcatcactatgaaatgtaaacgtctgaatgaagttattgaactcctccagccagcctggcaaaaagagccagaccttaacctgctgcaatttttgcagaaactggcgaaagagagtggttttgacggcgaactggcggatttgacggatgacattctgatctatcacctgaaaatgcgtgattccgcgaaagatgcggtgatcccgggtttgcagaaagattatgaagaagacttcaaaacggcgctgttacgcgctcgcggcgtaattaaagagtaaaagcttgtaagcggcgccaccaaaatcatcgtgaaatgatatccttcgtcattcgtaatgttttccggatgatgggatgaataacagcgcttttactttccagacactacacccggataccatcatggacgctctgtttgagcatgggatccgggtggattccggtcttaccccgcttaacagctatgaaaaccgtgtctatcaatttcaggacgaagatcgtcgacgttttgtcgtcaaattttatcgccctgaacgttggacagccgatcaaatcctcgaagaacatcaatttgcgttgcagctggtaaatgatgaagttccggtcgcagcacctgtggcctttaacggtcagactttattgaatcatcagggattttatttcgctgtttttccaagcgtcggtggtcgccagttcgaagctgataatatcgatcagatggaagcggttgggcgttatttagggcgtatgcaccagacggggcgcaaacagctttttatccatcgcccgaccatcggtttgaacgaatatctcattgagccacgcaagctgtttgaggacgctacactgataccttccgggttgaaagcggcattcctgaaagcgacagatgagctgattgccgccgttacagcacactggcgggaagatttcaccgttctgcggctacatggagactgccacgccgggaatattctctggcgcgatggtccaatgtttgttgatctggatgatgcacgtaatggtccagccgttcaggatttgtggatgttgctcaatggcgataaagccgagcagcggatgcaactggaaactattattgaagcttatgaagaatttagcgagttcgacaccgctgaaatcggactgattgaacctttacgcgccatgcgtttggtttattatcttgcctggctaatgcggcgttgggctgatcccgcgttcccgaaaaatttcccgtggttaaccggggaagattactggctgcgacagacggcgacttttatagaacaggcaaaagttctacaagaaccccctttgcaattaacacctatgtattaatcggagagagtagatcatgaaaaagatttggctggcgctggctggtttagttttagcgtttagcgcaagcgcggcgcagtatgaagatggtaaacagtacactaccctggaaaaaccggtagctggcgcgccgcaagtgctggagtttttctctttcttctgcccgcactgctatcagtttgaagaagttctgcatatttctgataatgtgaagaaaaaactgccggaaggcgtgaagatgactaaataccacgtcaacttcatgggtggtgacctgggcaaagatctgactcaggcatgggctgtggcgatggcgctgggcgtggaagacaaagtgactgttccgctgtttgaaggcgtacagaaaacccagaccattcgttctgcttctgatatccgcgatgtatttatcaacgcaggtattaaaggtgaagagtacgacgcggcgtggaacagcttcgtggtgaaatctctggtcgctcagcaggaaaaagctgcagctgacgtgcaattgcgtggcgttccggcgatgtttgttaacggtaaatatcagctgaatccgcagggtatggataccagcaatatggatgtttttgttcagcagtatgctgatacagtgaaatatctgtccgagaaaaaataattcaatgtaaattacataaagcccgtgaatattcacgggctttttttattatttaataaatataaatacattctgataatgcatcctgccgctggacattatttcagcataagtggatattcaaagttttgctgttttatcagggaatatttatatgatacgtaagagtgctacaggtgttattgttgcgttagccgtaatctggggtggtggcacatggtacacaggtacgcaaattcagcctggtgtcgaaaaatttattaaagattttaacgatgctaaaaagaaaggtgaacatgcctacgatatgacgttaagttatcaaaattttgacaaaggcttttttaattcccgttttcaaatgcaaatgacattcgataacggtgcacccgatctcaatatcaagccaggccagaaagttgtatttgatgtggatgttgagcacggtccgttgcccatcacaatgttaatgcatggtaatgtcatcccagcactggcagcggcaaaagtgaacttagtgaataatgaactgacacaaccgctatttatcgccgcgaaaaataaaagccccgtggaagcgacattgcgattcgcgtttggtggcagtttctctacgacattagatgttgcccctgcagagtatggaaagttttcttttggtgagggccagtttacttttaatggtgatggtagtagtttgtctaacctggatattgaaggcaaagtcgaagatattgttctgcaattaagtccaatgaacaaagtaacggcaaaaagttttaccattgattctctggcgcgattagaagaaaagaaatttccggttggtgaaagcgagagcaaatttaatcagattaacattatcaatcacggggaagacgttgcccaaatcgatgctttcgttgcaaaaaccaggctggatcgcgttaaagacaaagattatatcaatgtcaatctcacctacgaacttgataagttaacaaaagggaatcagcaactcggtagtggtgagtggagtttgattgctgaatctattgatcccagtgcagtgcgccaatttatcatccagtataacattgcgatgcagaagcagcttgctgcacaccctgagttagcaaacgatgaagttgctctgcaagaagtgaatgctgcattgttcaaagagtatttaccgttattacaaaaaagtgagccgaccattaaacaaccggtaagatggaagaacgcactcggcgaactaaatgccaatctggatatcagtattgccgacccagccaaatctagtagttccacaaacaaagatatcaaaagcctcaattttgatgtgaagttaccgcttaatgtcgtcacagaaaccgcaaaacagcttaatttatctgaaggaatggatgcggaaaaagcgcaaaagcaggctgataaacaaatcagcgggatgatgacattaggtcagatgtttcagttaatcacgattgacaacaataccgccagcctgcagctgcgttatacaccgggtaaagttgtttttaacggacaggagatgagcgaagaagaatttatgtctcgtgccggacgttttgttcattaaaatactcactcgcctctgctcattcagaggcgagtaaaacttacttattctgacgctgactactcatgagagacgtcagaagccggtctttttcctgccacaaactgttcagccattgctgaaaatggcgcttaaagcttttgtcattgatgtagtcgccatgtaactcatcggcaataggctgtaaatccacatgtacgacaatccgcgtcagtttaccgcttaacatatcgaagaacggctgacggttattgtccggataacacagcgtaacattaagcagtttatcgaattgtttacccagtacatttagcgccatcgcaatgcctgccgcctttggtggcaacaagttttgaaaagtggagtgggtttgctgatgtttttcttgcgtgaaacgggagccttcaacgaaattgacaatggtggtgggatgcaggcgaaacttttcacaagaacgccgagtggtttcaacatctttaccacgtcgctccggatgacgtaataaataagcgcgggaataacgcttcataaacggcatatccaggctccagcacgccaggccaagaaatggcacccaggccagctgttgcttgaggaaatatttattcatcggaatgtgcttacgaaacagcacgcacagtacgacaatatctgcccaactacggtggttacaaataagcagataccagttcttcttacttaacccttccagcccgtgaacttcccattgaaggtgtgggttcagatgcagtaataccgccagaccttcacaccagcaatacatcataaaatcacaaaaacggctaacctttcgccaaatgactggcacaggtagcaatagttttacaatcccggcaatgatgatcgggacggaacaaaaaatagtgaccaaaatggtcaatacgatactcagcaaaagggttatcgcagcgagtattctcgtcataatgaatttattcaaaaggttagccatagacagtgcgctaaagaagcgcaaggcgcagattttagcagaaaacgacccaaataacggatgatccttaaggagaaaaataattcatatctatccacattagaaaaaatcccattatctcaattattagggatggatttatttttaactgcatgaaaaacaaagacaaacatcatgctgtaaaaagcatgataataaattaaaagcgatgtaaataatttatgcacaaagttatccacatgacgatttgcgagcgatccagaagatctacaaaagattttcacgaaaagcggtgaaaaactcatgttttcatcctgtctgtggcatcctttacccataatctgataaacaggcacggacattatggttcagatcccccaaaatccacttatccttgtagatggtagttcttatctttatcgcgcatatcacgcgtttcccccgctgactaacagcgcaggcgagccgaccggtgcgatgtatggtgtcctcaacatgctgcgcagtctgatcatgcaatataaaccgacgcatgcagcggtggtctttgacgccaagggaaaaacctttcgtgatgaactgtttgaacattacaaaagtcatcgcccgccaatgccggacgatctgcgtgcacaaatcgaacccttgcacgcgatggttaaagcgatgggactgccgctgctggcggtttctggcgtagaagcggacgacgttatcggtactctggcgcgcgaagccgaaaaagccgggcgtccggtgctgatcagcactggcgataaagatatggcgcagctggtgacgccaaatattacgcttatcaataccatgacgaataccatcctcggaccggaagaggtggtgaataagtacggcgtgccgccagaactgatcatcgatttcctggcgctgatgggtgactcctctgataacattcctggcgtaccgggcgtcggtgaaaaaaccgcgcaggcattgctgcaaggtcttggcggactggatacgctgtatgccgagccagaaaaaattgctgggttgagcttccgtggcgcgaaaacaatggcagcgaagctcgagcaaaacaaagaagttgcttatctcagttaccagctggcgacgattaaaaccgacgttgaactggagctgacctgtgaacaactggaagtgcagcaaccggcagcggaagagttgttggggctgttcaaaaagtatgagttcaaacgctggactgctgatgtcgaagcgggcaaatggttacaggccaaaggggcaaaaccagccgcgaagccacaggaaaccagtgttgcagacgaagcaccagaagtgacggcaacggtgatttcttatgacaactacgtcaccatccttgatgaagaaacactgaaagcgtggattgcgaagctggaaaaagcgccggtatttgcatttgataccgaaaccgacagccttgataacatctctgctaacctggtcgggctttcttttgctatcgagccaggcgtagcggcatatattccggttgctcatgattatcttgatgcgcccgatcaaatctctcgcgagcgtgcactcgagttgctaaaaccgctgctggaagatgaaaaggcgctgaaggtcgggcaaaacctgaaatacgatcgcggtattctggcgaactacggcattgaactgcgtgggattgcgtttgataccatgctggagtcctacattctcaatagcgttgccgggcgtcacgatatggacagcctcgcggaacgttggttgaagcacaaaaccatcacttttgaagagattgctggtaaaggcaaaaatcaactgacctttaaccagattgccctcgaagaagccggacgttacgccgccgaagatgcagatgtcaccttgcagttgcatctgaaaatgtggccggatctgcaaaaacacaaagggccgttgaacgtcttcgagaatatcgaaatgccgctggtgccggtgcttagtcgcattgaacgtaacggtgtgaagatcgatccgaaagtgctgcacaatcattctgaagagctcacccttcgtctggctgagctggaaaagaaagcgcatgaaattgcaggtgaggaatttaacctttcttccaccaagcagttacaaaccattctctttgaaaaacagggcattaaaccgctgaagaaaacgccgggtggcgcgccgagtacgagcgaagaggtactggaagaactggcgctggactatccgttgccaaaagtgattctggagtatcgtggtctggcgaagctgaaaagcacctacaccgacaagctgccgctgatgatcaacccgaaaaccgggcgtgtgcatacctcttatcaccaggcagtaactgcaacgggacgtttaagcagtaccgatcctaacctgcaaaacattccggtgcgtaacgaagaaggtcgtcgtatccgccaggcgtttattgcgccagaggattatgtgattgtcagtgcggactacagccagattgaactgcgcattatggcgcatcttagccgtgacaaaggcttgctgaccgcattcgcggaaggaaaagatatccaccgggcaacggcggcagaagtgtttggtttgccactggaaaccgtcaccagcgagcaacgccgtagcgcgaaagcgatcaactttggtctgatttatggcatgagtgctttcggtctggcgcggcaattgaacattccacgtaaagaagcgcagaagtacatggacctttacttcgaacgctaccctggcgtgctggagtatatggaacgcacccgtgctcaggcgaaagagcagggctacgttgaaacgctggacggacgccgtctgtatctgccggatatcaaatccagcaatggtgctcgtcgtgcagcggctgaacgtgcagccattaacgcgccaatgcagggaaccgccgccgacattatcaaacgggcgatgattgccgttgatgcgtggttacaggctgagcaaccgcgtgtacgtatgatcatgcaggtacacgatgaactggtatttgaagttcataaagatgatgttgatgccgtcgcgaagcagattcatcaactgatggaaaactgtacccgtctggatgtgccgttgctggtggaagtggggagtggcgaaaactgggatcaggcgcactaagattcgcctgaacatgccttttttcgtaagtaagcaacataagctgtcacgttttgtgatggctattagaaattcctatgcaacaactgaaaaaaaattacaaaaagtgctttctgaactgaacaaaaaagagtaaagttagtcgcgtagggtacagaggtaagatgttctatctttcagaccttttacttcacgtaatcggatttggctgaatattttagccgccccagtcagtaatgactggggcgttttttattgggcgaaagaaaagatccgtaatgcctgatgcgctatgtttatcaggccaacggtagaattgtaatctattgaatttacgggccggatacgccacatccggcacaagcattaaggcaagaaaattattcgccgtcctgcgtttcttctacaggctgcatctcgctaaaccaggtatccagtttctgccgcagcttgtccacgccttgtttcttcaagctagaaaacgtttcaacctgcacatcaccgttaaacgccagtacagcttcacgcaccatattcaattgcgctttacgtgcgccgcttgccagtttgtccgctttggtcagcagcaccagaacggcgatattgctgtctaccgcccactcaatcatctgctgatccaaatctttcagcggatggcgaatatccattagcaccaccagaccttgcaggctctgacgtttttcgaggtattcgccgagcgcacgctgccatttgcgcttcatctcttccgggacttccgcataaccgtacccaggcaagtcaaccagacgcttgccgtcagccacttcaaacaggttgataagctgggtgcgccctggggttttactggtacgagccaggcttttctggttagtcagcgtgttcagcgcgctggatttacctgcgttggaacggcctgcaaaagccacttcaattccggtatcggaaggtaggtggcgaatatcaggcgcactcatcacaaaatgcgtctgttgataattcaaattagtcaaagcggtcgtctccgtcagtcaaagctttgtggcgattatacctgaaccataataaaaggcggatttttcggcgtgagcgttgtaagtaaaagccatacgctttgtgagacattgccgatagtctttatgcgaaatagcagagaaaattctgcgatgcatgtcaaataagctatataaatcagtgaattgcttttatataaaactctgaaaatgtgcaaatactgatggcggttgattgtttgtttaaagcaaaggcgtaaagtagcacccatagagcgaggacgctaacaggaacaatgactcaggatgagggtcaggagcgccaggaggcgaagacagaggattgtcaggaagacaaacgtccggagacgtaattaaacggaaatggaatcaacacggattgttccggctaaaggaaaaacagggtgtgttggcggcctgcaaggattgtaagacccgttaagggttatgagtcaggaaaaaaggcgacagagtaatctgtcgccttttttctttgcttgctttctgttagattccgccgcaaatctatactgaataaaacggctaaaagacgaaccattatgaaaccaagttctagtaacagtcgcagcaaaggtcatgcaaaagcgcgtcgaaaaacacgcgaggagctggatcaggaagctcgtgatcgcaagcgtcagaaaaaacgtcgtggtcatgcgccgggcagccgcgcagcgggcggaaacaccacgagtggcagcaaaggccagaacgcaccaaaagatccacgtattggcagtaaaacccctattccattgggcgtgactgaaaaagtcaccaaacagcacaaaccgaagagtgagaaacctatgcttagtccgcaggcggagttggaattactggaaacggatgagcgtctggatgcgctgctggaacgtctggaagcaggcgaaaccctgagtgccgaagagcaatcctgggtggatgctaaactggatcgtattgatgagttgatgcagaaactcggcctctcttatgacgatgacgaagaagaggaagaagacgagaagcaagaagacatgatgcgtctgctgcggggcaactaacggattgccgccgtgggccttcccgttctgctgataacccttccggttatatgttatctggtgtggttattcgttaaactacagcggttgtcgcggcgacaaaagtggctgcgcaaccggctgatgacccgaaacgggcatccgccggtacgccgtagccgccagagacgccatcggaaggagtgagcatgtctgtacagcaaatcgactgggatctggccctgatccagaaatataactattccgggccacgatacaccagctacccgaccgcgctggagtttagtgaagacttcggcgaacaggcgtttttacaagccgtggcgcgctatcctgagcgtccattatctctctacgtacatatcccgttctgccataagctttgttacttctgcggttgcaataagattgttactcgccagcagcacaaggccgatcagtatctggacgcgctggagcaagaaatcgtccatcgtgcaccgctgttcgccgggcgtcacgtcagccaattgcactggggcggcggaacgccgacgtatctgaataaagcgcaaatcagccgcctgatgaagctgctgcgcgaaaacttccagttcaatgccgatgcggagattagcatcgaagtcgatccgcgggaaatcgaactggatgtactcgatcatttacgcgccgaaggctttaatcgcctgagcatgggcgtgcaggacttcaacaaagaagtgcaacgtctggttaaccgcgagcaggatgaagagttcatctttgcactgcttaaccatgcgcgtgagattggttttacctccaccaacatcgacctgatttacggcctgccgaaacagacgccggagagtttcgcctttaccctgaaacgtgtggcggagctgaaccccgatcgtctgagtgtctttaactacgcgcatctgccgaccatttttgctgctcagcgcaaaatcaaagatgctgacctgccgagtccgcagcaaaaactcgatatcctgcaggaaaccatcgccttcctgacgcaaagcggctatcagtttatcggtatggatcactttgcccgtccggatgacgagctggcggtggcccagcgtgaaggcgtgctgcatcgtaacttccagggctacaccactcagggcgataccgatctgctggggatgggcgtttccgccatcagcatgattggcgactgctacgcgcagaaccagaaagagttgaagcagtactatcagcaagtggatgaacaaggcaatgcgctgtggcgtggtattgcgctaacgcgtgatgactgtattcgccgcgatgtgattaagagcctcatctgcaacttccgtctggattacgcccctattgagaaacagtgggatttgcacttcgctgattactttgcggaagatctcaagctgctcgccccgttagcaaaagatgggctggtggatgtggatgagaagggaatacaggtgacggcgaaaggtcgcttgctgatccgcaacatttgcatgtgctttgatacctatctgcgccagaaagcgcggatgcagcagttctctcgggtgatttaaatagtgaatggcgcttcgtttacaaagtagaaaacgaaagcgccatcaatgtgctgagaacaagattgcctgatgcgctgggcaacaaaacctgttgaaattattgcttttgtaggccggataaggcgtttacgccgcatcaggcatctgagcatgatgcctgatgcggcgctggtcgcgtcttatcaggcctacgactttctccgcatccggcataaacaacgagcttcagctaaacagcccaatcattgcggcacacagcacggcagcaacggcagtttgcggtgtgtggctgtcaactgcgccactcgataccagattaattattgattccagcataatgactctccccgttttccgggcaagatcatactgaacttatcggaacagtaaagcgtaaaataccagcaatttgcgctcaataatcaatctttacacacaagctgtgaatcactccatccccagctcttttaacttacgcgtcagggtgttgcggccccagccgagtagccgcgccgcttcctgtttatgcccctgcgtatgtcgcaacgcggtcgtcagtaacgtccgctccagctctggctgcgcttcggaaagcagattttgatgaccggaacgcagcgctctgtctgcccactgcgcaagaagcgtcgcccagctgtccggttgcatttggctagtactctccgcaaccgtactttcaaacagttcgccgggcaaatcctgaatcaacacttcctgcccggcggccatcaccgttagccagcggcaggtgttttccagctggcgcacgttgcctggccacgccagacgcgtcagagcagcttcggtttccggatgcagtaacttcgcttctacgcccagttcgcgcgcggcaacctgtaaaaaatggcgcgccagacggggaatatcttcccgacgttcgcgcagcggcggcagatgaacgcggataacgttcaggcggtggaacagatcctcacggaacttaccttcctgcactcgctgttcgagattctggtgagtggcagcgataatccgcacatccactttcaccggcgcatagccgccaacgcggtaaaactgaccgtctgccagcacgcgcagcaaacgcgtctgcacatccagcggcatatcaccaatttcgtcgaggaataatgtaccgccatcggcctgttcaaaacgcccctgacgaatggtattcgcgccagtaaacgcgcctttctcgtggccaaacagttcactttcgatcaaatcttttgggatagctgccatattcagcgcgataaacggcgctttggcgcgcggactgtggcgatgcagggcatgagcgaccagttctttaccggtgccggattcgccgttaatcagcacgctaatagaagaacggctaagccgaccgataatacggaacacgtcctgcatggctggcgcttcgccgatgatatcggtcgttgggccgttaagctgaacattacgcggctgctgctgttcctggtaatgactgatagcgcgctcaaccagcgccactgcttcgtcgatatcaaacggtttgggcagataatcaaacgccccttgttgataggcgctgacggcagcatccagatcggaatgtgcggtcataatgatgaccggaagcattggatggcgctgtttaatctgcttgagcagcgccagcccgtccattcccggcatacggatatcactaagcagcacatccggcgttttgctcgccagcgcctccagcacttctgcgccgttctcaaacgtcgtacaggttaaacctgccccagcgagcgcacgttcaagcacccaacggatggaactatcgtcatcgactacccagactatccctcgttgcataaacgtcacctttatttcctgataggcaggtaaacgctgaactcggtatgccctggccaactggtaaattcaattttgccactatgctgatcaatcaaattacgagcgatggataagccaagcccggtgccaccttcgcggccgctgaccatcgggtaaaacagcgtatcctgcaaatgaggcggaatgcccggcccgttatcttccacatcaatccgcgccgccagccggtagcgctcgccgtgtaaggtcagttgaaacgcggtgcgggtacgcagaatgatttcaccgccttccggccccagcgcctgtagcgcattgcgcacaatattcagcaagacctgttcaatttgatccgggtcgtgcgccagttccggtaggctgggatcgtaatcacgaatcaaccgcacgttgtccggcagttccatgctcaccagcgttaccacgcgttcagccactttgtgaatactttcggtaacgcgcgtaccgggcagctgcggccccaacagacggtcgaccagatttcgcagccggtccgcctgttcgataatcactttggtatattcgagtagacttgggtcaggtaacgctttgctgagcagctgcgccgcgccacgtaaaccgccaagcggatttttaatctcatgtgccaggccgcgcactaaatcacgggcagcaacctgctgggcgtgctgtagctgttcctgacttaagcggcgctggttatccatcggagccatctccagcaggatcatgccgtccggcatacgctgggccgtcacagaaaggatatggctgcgcccgtcgatgaccagcgtcacttcgttatcggtaaaaccttgccccgcctccagactttcttgcatcagctcgatatttaaactgaagtagctcaacagttccggtaacggtgtaccaaacaatttgcgggagctttgggcgagcagttgttgcgcggcagggttggcgtaatggatcgccaggttgtcatcgattaacaaaatactgttaatcaggctgttgaggatctgcccagcatcgggctgcgtgcctgttgccataaagcagtctcctgaacaggttgcaccattttagtgcattatagctttttacggataaaaagcgcgaagcatcagagaattgacggagaaaaaagcccatgcagagatgggctacagatagctgacaaacttcacgttggagagcgactcacctgctccggcctaccacatcatcaccgtgtaggccggataagacgcatttgcgtcgcatccggcgtgatgtgcttgccaccgatcccaggcctgccagagacaggcgaaaagtttccacggcaactaaaacacttagacgctgtagtacagctcaaactctaccggatgcggagtcatacgcacgcggtcatcttcttcgcgacgcagagcgatgtacgcatcaattgcttcgtcagtgaacacgccaccggctttcaggaactcgcggtccagatccagttcgttcagtgcttcttccagagagcctgcaacctgtgggatctctttcgcttcttctggcggcaggtcatacaggtttttgtccatggcttcgcccggatggatcttgttcttgataccatcaagaccggccatcagcagggcagcaaagcacaggtacgggttagctgccggatccgggaaacgtacttcgatacgacgtgctttcggagaagaaaccaccggaatacggatagacgcagaacggttacgcgcagagtaagccagcattaccggtgcttcatagcccgggaccagacgcttataagagttggtggtcgggtttgccagggcgttaatcgctttagcgtgtttgattacgccgccaatgtagtacagcgcctgctcagacagacctgcgtatttgtcgcctgcgaacaggttaacgccgtttttagacagagacatgtggcagtgcataccggagccgttatcaccgaacatcggttttggcataaaggtcgcggttttaccgaagcggtgcgctacgttgtgcacaacatatttgtagatctgaatttcgtcagcttttttggtcatggtattgaagcgggtagccacttcgttctgaccagcagtcgctacttcgtggtgatgggcttcaaccaccagacccatctgttccatcaccagacacatttcagaacgaatatcctgagcgctgtctaccggtggaaccgggaagtaaccgcctttcactgccggacggtgacctttgttaccaccttcgtattgggtggaggagttccatgcgccttcgatatcgtcgatagcaacgtgggaaccggagatagaacttccgaaacggatgtcatcgaacaggaagaattcaggttctggcccgaacagtacggtgtcggcaatgccagtggaacgcaggtaatcttcggcgcgcttcgcaatggagcgcgggtcacggtcatagccttgcagggtgccaggttcaaggatgtcgcaacggataatcagggtggagtcggcgaagaacgggtcaatcactgcggtggatgcgtctggcatcagcaccatgtcggactcgttaatgcctttccagccgccaatgctggagccgtcaaacattttgccttcttcgaagaattcagcattcacctgatgagcagggatagtgacgtgctgttctttacctttagtatcggtgaagcgcaaatcaacaaacttcacttcgtgctcgttcagcatcgtcagtacgtgttcagcggacatactttaactctcctggattggtcatggtcgtcgtggtaacgaaatctgcaattattttggccgtgtcgccgtaaaaaagataaagcgaaatctgtgccaacttttaaattgcccctaaaaggcgttatcatgcgcaccatcgtgcaaaagggctgcaccacgatgtgaatgttgcaccaatatagtgcttcaatggaaacattaagcaccatgttggtgcaatgacctttggataaccctttttatgctccgtgaaagcgatcacaaagggactctgcaatacttgtttgcggaggatgtttgtgatcctgttttgtagtgcgattaatccgtgtacaataacgcgctatttctaatgcctgaggcaaagttgtgatcgaaaaattgcgtaatatcgccatcatcgcgcacgtagaccatggtaaaaccaccctggtagacaagctgctccaacaatccggtacgttcgactctcgtgccgaaacccaagagcgcgtgatggactccaacgatttggagaaagagcgtgggattaccatcctcgcgaaaaacaccgctatcaaatggaatgattaccgtatcaacatcgttgataccccggggcacgccgacttcggtggtgaagttgaacgtgtaatgtccatggtagacagtgtgctgctggtggttgacgcatttgacggcccgatgccgcaaacgcgcttcgtaaccaaaaaagcgtttgcttacggcctgaagccgattgttgttatcaacaaagttgaccgccctggcgcgcgtcctgattgggttgtggatcaggtattcgatctgttcgttaacctcgacgcgaccgacgagcagctggacttcccgatcgtttacgcttctgcgctgaacggtatcgcgggtctggaccacgaagatatggcggaagacatgaccccgctgtaccaggcgattgttgaccacgttcctgcgccggacgttgaccttgacggtccgttccagatgcagatttctcagctcgattacaacagctatgttggcgttatcggcattggccgcatcaagcgcggtaaagtgaagccgaaccagcaggtcactatcatcgatagcgaaggcaaaacccgcaacgcgaaagtcggtaaagtgctgggccacctcggtctggaacgtatcgaaaccgatctggcggaagctggcgatatcgttgcgatcacgggccttggcgaactgaacatttctgacaccgtttgcgacacgcaaaacgttgaagcgctgccggcactctccgttgatgagccgaccgtttctatgttcttctgcgttaacaccagcccgttctgcggtaaagaaggtaagttcgtaacgtctcgtcagatcctggatcgtctgaacaaagaactggtacacaacgttgcgctgcgcgtagaagaaaccgaagacgccgatgcgttccgcgtttctggtcgtggcgaactgcacctgtctgttctgatcgaaaacatgcgtcgtgaaggtttcgaactggcggtatcccgtccgaaagttatcttccgtgaaatcgacggtcgtaaacaagagccgtatgaaaacgtgactctggacgttgaagaacagcatcagggttctgtaatgcaggcgctgggcgaacgtaaaggcgacctgaaaaacatgaatccagacggtaaaggccgcgtacgtctcgactacgtgatcccaagccgtggtctgattggcttccgttctgagttcatgaccatgacttccggtactggtctgctgtactccaccttcagccactacgacgacgtacgtccgggtgaagtgggtcagcgtcagaacggcgtactgatctctaacggtcagggtaaagcggtcgcgttcgcgctgttcggtctgcaggatcgcggtaagctgttcctcggtcacggtgcagaagtttacgaaggtcagattatcggtattcatagccgctctaacgacctgactgtaaactgcctgaccggtaagaaactgaccaacatgcgtgcttccggtactgacgaagccgttgttctggttccgcctatccgcatgactctggaacaagctctggagttcatcgatgatgacgaactggtagaagtgactccgacctctatccgtattcgtaaacgtcacctgacggaaaacgatcgtcgccgcgccaaccgcgcaccgaaagacgattaatttcgttttttagtcataaaaaacctgccagcgatggcaggtttttttttgcctgtcgtgagcgcacaccaatgcgagtatctcccttataagtctgtggttacgtcaatagagagctttgtcacaattatctgcaaagtcatacgccgttaattgctttcttttttggcgtaagcgtaagatgcttcatctggtttaaaccaaaaggattaaacaatggcggagaatcaatccaccgtagaaaatgcaaaagagaaactggatcggtggttgaaagatggcatcaccacgccgggtggaaaactccctagtgaaagagagctgggagaactgctgggcattaaacgtatgacgctgcgccaggcgttgttgaacctcgaggcagaatccaaaatcttccgtaaggatcgtaaggggtggttcgtgacccagccgcgatttaattacagtccggagctgagcgcgagctttcagcgggccgcaattgagcaagggcgagagccttcctgggggtttaccgagaaaaaccgtaccagcgatattcccgagacgctcgcgccactgattgcagtgacgccaagtactgaactctatcgcatcaccggctggggggcgctggaaggacataaagttttctatcacgaaacatatattaatcctgaagttgctccgggctttattgaacaacttgaaaaccacagtttttctgcagtctgggaaaagtgctaccaaaaagagacggtagtaaaaaaattgattttcaaacccgtcagaatgccgggcgatatcagcaagtatcttggcggttctgcgggtatgccagcgatcttaattgaaaagcatcgcgccgaccagcaaggcaatattgtccaaatagatattgaatattggcgatttgaggccgtagacctcatcattaatctgtaagtgttttatggtgacaataaataacgcaagaaagattctacaacgtgtcgacactcttcctctttatttacatgcttatgcctttcatttaaatatgcggctggaaagagtgttgcctgctgatttacttgatatcgcaagtgaaaataatctacgtggcgtcaaaatccatgttctcgatggcgagcgtttttctcttggtaatatggacgataaagaactctctgcctttggggataaagcccgccgtctgaaccttgatattcatattgaaaccagcgccagtgataaggcatctattgacgaagccgtcgccatcgcgttgaaaactggggcaagctccgtacgtttttatccacgttatgaaggtaatttgcgcgacgtattaagcattatcgctaacgacattgcctatgtacgggaaacgtatcaggacagcggcctgacttttacgatcgagcagcatgaagatttaaaaagtcatgagctggtgagcctggtcaaagaaagtgagatggaatctctttccttactgtttgattttgcgaacatgatcaatgcaaatgagcatcccatcgacgctttaaaaacgatggcaccgcatattacccaggtccatatcaaagatgccttgatcgttaaagaaccgggtggcctgggtcataaagcctgtattagtggtcagggtgatatgccgttcaaagcgttattaacgcaccttatctgcctgggtgatgatgagccgcaggtgacggcatatggcctggaagaagaggttgattactatgcgccggcgttccgctttgaagacgaagatgataatccgtggatcccttatcgccagatgagtgaaacaccattgccagaaaatcatttactggatgcgcggttacgtaaagaaaaagaagatgcaattaatcagataaatcatgtgcgtaacgtactacaacaaatcaaacaagaggcaaaccatcttctgaaccactaataagttttaactcatacgcagttaataaaaccattccatatgaatggtcggtatcttattgcctttaaaacagtgattttaaaaatcgcttaggggatgttatgctcacgaaaaagaaatgggcgttatttagtctattaacactgtgtggcggtacaatttataaattaccgagcctgaaagatgcgttttatatcccgatgcaggaatatttccatttgaccaatggtcaaattggtaatgctatgagcgtaaacagttttgtcaccacagtgggcttttttctgtctatttattttgccgataaactaccgcgcagatacaccatgagtttcagtctcattgcgacaggattactgggtgtttatttgacgacaatgccggggtattggggcatcctctttgtctgggcgctatttggcgttacttgcgacatgatgaactggccggtcttgctcaagagcgtaagtcgattgggcaatagcgaacaacaaggtcggttgtttggcttcttcgaaacagggcgtggcattgtcgataccgtggtggcattttctgcgttggcagtatttacctggtttggcagtggcttattaggttttaaagcaggcatctggttctattcccttattgtgattgccgtaggcattattattttctttgtcctgaatgacaaagaagaggcaccgtccgttgaggtgaaaaaagaagacggagcaagcaaaaacaccagtatgaccagcgtgctgaaagacaaaactatctggcttatcgcttttaacgtcttcttcgtttacgcggtttactgtggcctgacattcttcattccattcctgaaaaacatctatctattgcccgttgcgctggtgggggcttacggcatcattaaccaatactgtctgaaaatgattggtggaccgattggtggcatgattagtgataagatcctgaaaagcccaagtaaatatctatgctacacctttatcattagtaccgctgcgctcgtactgttgattatgctgccgcacgaaagtatgccggtctatttagggatggcatgtacgctgggctttggcgcgatagtctttacacagcgagccgtattttttgcacctatcggcgaagcaaaaattgctgaaaataaaacaggtgcggcgatggcgttgggtagctttattggttacgctccggcgatgttctgcttcagtctgtatggctacattctggatttaaatccggggattattggctacaaaatcgtgtttggcattatggcctgcttcgcattcagtggtgcggtggtttccgtaatgctggttaagcgtattagccaacgtaagaaagagatgctggcggctgaagcttaattaatggccggatgtgcttaatccggccaacgaaaaccgtatcaaccgtaggccggataaggcgtttacgccgcatccggcagtttcacatcagaagaaatacttcgtcccgatacggatctggttttgctcgcggtggtacggttcgacgttgcggtctaaccagcgcaattcgaaataagggagccagtgttcattaatacggtaacggaaggtgttagtgatttcccaatgatgatctttcccgttgctactattaaagtcattcactcgcatgaagtaatgtggctcaaatgtataggaaaatttatcggtgattttaaaattccagtaggtgccaatttcataggtgtcattattatccagttccccgctcaaatctgtactactatagttattatggttatagcgatttcgtactgtcagattaaaccatggtacaaatttatagttgacgtccagatacactgcaccaccgctaccgatactcttatcattaattaagccaccgggctggatggttaatttatcggttggtttaaataacggataccagccttcaatttcgttatatccatgttttagttcatcttctcgctgaaagttgtaggtattggttaacataatacccgcgcccatatcgaagttataacccacacgtagcataacctcgccctgatcggaggcaagattatatgcctccctgttttcgacgtatgcgccagcaaatacgctggcagaggtcagagaagataataaaattattgcattaatctttttcataataagtccattttttaaacgtagggaggccgccacccaccaggatggaaatagcggctattgacatttataacgttacggaagccgttttttcttctgtcgccatctctttatttttgcgttggttgatttcctcaataatcaatgcaaaccgtttttcattgagtgtgtaaaagaatcccatcgtcaatgcagcaataattgccagtgcacaaggccagataaaaatgagctgacgcaaaccctgtaatgtcgcatcgctttgcgcgatgttgggaacataaccaatttgcgtcagcataatgcctggcaagaagccagcaagtgcggcagaaattttacgaaagaaggtataaccggtataaacagaaccttcggcacgaataccggttttccattcaccgtaatctacggtatctggtaccagtgcccagttcaggctgtttacaaaggccgtgccaaaaaaggcgacacaagagaacatgacgaaagtgaaagagttacttccccagaaataattcagtatatcacccaccgcccacagcaccatgccagccagataaacctgttttttaccaaaacattttacagttaatggcaccagtaatacgccgatgaggatgcatcccatactgaagaatcccatccagctcaataaattaatatcattcagcacatactgggtgtaatagacctgaatcgccagtttgatattaaatgccgccagggtacacaagttagcaatgcataaaaccagcaatggcggattccgaaatatcgcgcaaaaacttttgagaatactggctttatgtccggttggcgttgtgtccacataatgctctttgacgcctctgtagcacagcatcataaaaataaagccgccaatggagaacataagtgccgcacaggcataaccgacggtactgtcagaaaaaaggctctgcaacggaataaacgccacggtacaaatcaatagccctatggttgcaccaccctggcggtaagccgcgagctgcgcgcgctcattcgggtttttggtaattgccgggatcatcgcaccatagctgcagttcatcagactgtaactaagtccaaacatcataaacagcgcggtggcaatcgtcgttttaaccggcaaacaaaaggtggtggcgataaactggagcgttgcaattaacgccgccggaaccgctgcatataaaataaagggacgaaatttgcctttaggcccaatatttttccggctgtcgagtaaaaatccggtgagcatatcggtaaacgcggtaaaaaacttcgccaccagaaagataatcccgccatagtaagcaggcatccctaattcatcggtataaaatttgaggagatacagagtaccgatgcagagcattaaattgctaccgacgtcgcccataccataggcgattttttcccgcagattcagttttaatgtcagtggattatggtcagacataatcactccttataacgccccgcagggcgtcgtttattattattacgccgtgcgtttacgggcttctatctcttccacaatgcggacatacatcttctcgttcaggctgtagaagcaacccatcgccacaatggtgactaccgccagtgcgcttgggtagatgaagatcaactggcgtaacccttcaatggtgtggtcagcctgtgcgacgttcggcacatagccaatttgcgtcagcatccagccggggaagaaaccagccagcgcctgagacactttgcgaaagaaggtaaaaccggtgtagaccgttccttcgctacgcacgccggtgcgccactcgccgtactcgacggtgtcggaaaccagcgcccagttcaggctgttaacaaacgcactgccaaagaacgccaggcaggagaacgccacgaagctgacgctaccgccgccgaagaaatagttgagcagatcgcccagcacccaaatcagcaggccgccgatataaactttcttcttgccaaaacgtctgacactggcaggcatcaggaatacgccgatgaaaatacagcccatgctgaaaaatcccatatagctcaacaggatgggatcgttaagcacgtactgggtgtaatagacctggatggcgagcttgacgttaaacgcccctaaagtgcagaggttggcaatgcacagaatgaacagcgggcggttacccgcaattgcgcggaaagattgcagcaggcccggcttttgcgccggattagcaggctgggtttcgacataacgctctttcacgccgctgtagcagatccacataaacagcaggccaaacagactaaacagcgtggcggcgaagatatagccaagttgctgattaccttcgataagattcataactggcacgaatcccaccgtgcacagcagcaggcccagcgtagcgccgccctgacgccatgccgccagactggcgcgttcgttggggtttttggtgatagcgggaaccattgcgccgtaggagcagttcatcatgctgaaaaacagtccgtaaagcataaacagaatagtggccatcaccgttttaccggtgacatcaaacggtgtgccgacaaagttggcgatcgccagtaaggtgaccgggaaactcgcatacagaataaaaggacggaacttaccttttggaccgatcttgcgtcgggaatccaacataatgccggtacccatatcggtaaacgcagtaaagaatttactaatcaaaaagataatgccgccataggtgcctggcagccccagaacgtcggtataaaacttcaaaagataaagcgtaccgatatccagcaggatgttagaggccaggtcgccaataccgtaagagagtttctctttaaagggcaggcgtaaagttgctggatcttccgttgtgatgtgactcatgcttgttctccctttgcccatgagtttccccacgggcggatgtgattagatgctttttaagctcgcgaacagtgccgcccattcgctatcggcgcgataaaagaccggcggcttgccgatgggcgcattaacggtaacttccccgccccggaacgcttcacccgtccaggcgtggacccagttatcctccggcagatagagcgtccagtcgctacggccttcttcatgcaccggagcgaccagaatgtcgcgacctaacaggtactgatatttcagggtgtaagtgtgcgcatcgtcttcgtaatgcaggaacagcgggcgcataaccggcaggccggacttcgcattcagcgcgacggcctctttcaggtaaggtttcagggtggtgaagacggtggtcatacgggcgaaatgggcgatggtttctgcgtcgccgtcaaactgccagttgtcgccaggacggttaccttcgtgggtgcgcatcatcggcgtgaaggcgctgaaatcgcaccagcgcagcagcagctctttgctgcgcttcatctcaaacagggtggtgtaaccgccaatgtcgctgtggtgcaggccatgtccggtcattgccaggctcagcgccgccgggacaacgctcgccaggccatcgtcgagactccagtcgacgttctggtcgcccgcccacatcatggtggagtatttctggctaccggtagaaccggcgcgcataaagaaaaggatctcgccgagcttgcccgtttcttcaagggcttcgtagttacacttcgcccacagcgcaggccaggcgttatgcataatttcggcactgacgccgttatgcaagtacgtgtcggtgggcagatactcgccgaagtcagccatccagccgccgcagccgagttcaatcatgttctttttgatcacttccttgaaccaggcgtaggcttctggattagtgagatcgacaacgccgccgtaaaactcgccaaactccaccagatagtcaccgccagaggcatcttttgccagatagccgtgttgtgccgcttcttcgcagagatctttatcgctggcaacatacgggttgatataggccaggaactgcacgccctcctgattccactgcttaatgcgactatccagttgcgggtagttttcgctgttccacttccagttccacatcacgcgtttgccaaaagaggtcatacgaataccggaccagtcctgcgcccagatgccgttgaccttcacgcccgcgttacgcatggtgtccagtttcttctggcacacttccgtcccgccctgaatgccgagcgttactccgtcataaatccagtcgggcagttctggctggcgtcccagcagggcggttaatttttccagcagggaaatgtatgtgtcagcacattcaaaacgcagcgttgctttgtcttcccacagcgccagttcatggtattccggggcactaaagtcgaagttcatatagcaactgttatcaacatggcagtaatacttctgcgtgctgacaaacgtaggctgtgggaagaaagtccagtaatagtcgccgcccgcattttctttgcagtcggcctgccaggtgacataggtttgtttgttgcgaccaacgccttgttcactggtccatagcgggaacggtttgccacgcagatcgaagtaggaaaactgttcgccgcagccgtagatatggtcctctggttgagcggcaaggcgcagccagatacggttgtggttaaggttgtcgttttgtagttccagcaataaacgcccctgatcgtcggcagagatattcagcgtggcgctaatgtcagaaccacggctgaaatgaattaaccaaccatccggactctggctgacgatggcgtcggtaagcgcaattttctcctgtagtttatctttaatgctgaaattaccgcggaacatatcgatatccgctataccactgccaatccataaacaaggattatctttgctatgggttaaaataagacgttgttgaaaatgtagggtaaaactgtcgttattctgatgaaattgaaaatctaataactgtggacgtggcgtatccataactaatctccatagagttgagaacgagattgttgccttcctgttattacaggcttatgtaaaatgattctcataaaactgatatataaaaactttacagaagctgagctgtttttaacttaataaattgaagatacataatgttgcctttagcgagtgaaatgttcttcaatgattttgactgctaatcaatacaagttattttctctgtccgtaaatattaaaaaacaggcggtgcggttttccactttccagtaataataagtcgataccactattaaaggcgttaggcgggcaactcataggttcaactgccagtccctgacgctgtaatttttcaccgctataaacctgcacccagagttgatcggaacaaaggcttacgctaagcgcctgctgtggatgggtaatggtcatttcccacaaatcattagcggttttaaaggtgtggtcgatttttgtcgcggctatttttttcgcctgcgtgaaatttaaatccagctcatcaacgtggtgaagcgttgtcggattcgcgtgctcatcgacggcataaacctggtttgccggaagctggaacagatattcatcaacagatgttaagttgcaggttaaataaggatgaatacccacgccataaggcgctgcgacagtgccgatattctggcttgcgatctcaacggaaagacccgtgtgtgcgttgaggctataaacaacttgactagccagcataaacggatagccgtaactgggcggcagaaaagctgtcagggtaacgctggtggcggttaattcactaatttgccagtctcgccaggcaagcagcccgtgaatagcggctttactactatgttcattaatgggtaactgatattcctgcccctgatagcggtaacagccgttggcgatccggttcggccacggaataagcactttacccagatgcgccagcggcatctcttcgggtttgtgcgggatgactaaatgacaaccctgaaaggttaattcagccagaccagcaccgacggtcacaatggtcgcgtgataatcccccgcggcaagactaacggtctgtccactgcaatgcatattggtgatttgcatacaaggcaccttaattaagctcatacagcctcccgtgaggctgatgtcaaacccaaaaactgcaccggacggtcccctcgcccctttggggagagggttagggagaggggaaaacccgcaccctattttcagatcagttatttcgcattaatatccagcagacccgctgcaaccgctggagccatgccgggcgctaacgggatacgcgggatcaccaggcaatgcagcaggtgataaatatcctgtttgccgtcccagactttggtggtgaccttattgtccgcatccagctcctgccaccaggaaccattttcatagtccatcaggtacttaatgcagtactcccaccatgtttgataccaggtttcatactggcgatcgccagtgacggtgtagagcgcgtaggccgtacccattgcttcgacgataggccaacgtacacgttcgcggaccaccggttttccttcccagtcaacggtataaacaatcccgtccgcgccatcgggtgcccaggcatcgcgcacggtggcgttaaacagacctttggcatcttctagcagccatgctggtggttgttcgcaacgggcttccagggcagcatggatgtgcagcattaaacggccccattcgatccagtggcctggtgtacctccgaacgcgcggaagcgatgcgccgggttatctttgttgtaatccggcagcggattccactgggtatcgaagtgttcgttaacgcgataatgattatttctggcgacgtcgtggataatcacggaagccacgcgaatcgcgcgatccagccattttttgtcgtgagtgacgtcataaacaatcaagaaagcttccaccgcgtgcatattggcattgccgccgcggtactcttcggttttgctgaaggcttcgtcccaggattccaggcacatctgctcttcttcgctccagaaatatttctcgataatttcaatggtgtaatcgagcagcttgcgcgcttccgggtgacccgttgtgacggcgctggcggcacccagcagagcaaagaagtgttgatagccctgtttggaggcatccaccacgccctcgtcattcacgcaggcataccagccgccatattttttatcacgcagtgcgccgttcatggctttgataccgtgatcaaccaagctgtaagcgccaggtcgacccatcgccgcagcaacggaataaacgtgcaacatacgagcggtgatccacagatgggtgcccatctcttctttgatttgccctttattgcctaaccagccaaaaccagtcggcactacggaatttttaccaaaatcaaagatgcggtcggtttcctgttccagccaacggttgtggcttagggtgttaaaccatttcattccttttatcctcatcttagcggcgtttagccatcatttcgtcgacgatatcgccaagttgttgtaatttcggtgcgcaaacgtcacgcagcatcagctcgttgtctggtaaaccgacgacgcttgcccagactgcacggcctgccaggaatccgcttgcgcccgccgtcattgccacgcgtacggcacgcgggaacagtttttcgtcgacaccggaagagaggatcacccatggcatattgatatggtcattcagacgttgactagcacagagaagctcttgttgcggacctttgccataaagcggcatttcaactttgtagaggtcagcgccactgtcgcccagctctttggcggcatcgatgatcgcttgttcgcgatcgaatttatcgccacgacgcggtgggcggacgactggctcaatgatgcttaccagaccgtgactgtggcacagttcgttgaactctttcaccatatccagacgttgctgcgcatcttcatcactacgccacagcaccagcagttttaaggctttgccaccgtcttgtttgatctgtagcggattgattttgcggtcaataaccacgctatcgaccggaataccgttgccaggaatgaactcatcggcggcgacaatcatggcgcaacttttggcaatcgcgttttgctcaaccacctggcggtagcagaattgttgatctaccagaatcgcgctggcataagggctgagggcctttgcagcgttaactttgaaatcagttaaaacgctatcggctaccggagcgggtgccccagccgcggcaaacatcatgcgcatggcttcgcgctgatcgaccgccagcatggcaaaaccgccgcttgcgcgcgtaatgtcgttgatggtgtacttattcattcatttattcctttatccagtcgttacatttttactttggcagtcatcccggcactgacacggacctgttccagaatggcggaccagtcctggcgaccgcgacccgctgcgcgcgcctggctataaacctcccgactggcggcccccagcggcattggcacatgcagctggttggcgacatcaagggcgatgccaagatccttatgggcaagatcgatcatgaaggcgggagaaagatctccgctgaggactttgtttggccaggaagtggtgaagtgacctttaccggcggcggtaccgctcatcactttgacggcaacatcgaagggaagattcagggcttcgcacaaaacggcggcttctgcgctaagcgcattgagcgcgatgctcatgtagttgttgatgagcttaacgcggatccccatgcccggaccgccagcgttgatcaactcactgcccatcgccatcaggatcggtgtggcacgttcaacttgttcagcggtgccgccagccagcagtaacagagtaccggtaatggcatttgcagaagtacggcctaccggaacatccatcatgctgaagcctttggcttgcatatcggcaatcaatttatcggtttgcagcggatggatggtggacatatcaatgaccagcgcatcggtagataagccttcgcaaacgccgttttcaccgaacaacacgttgcgcaccagatcgccattcggcaacatggtaatgataaattcggcatctttagcggcctgcgccgggttggcggcgggagtcgcacctttgtctaccagatgccgcacagcttcggcgttcacatcaaagacgcgaagttgatgcccttgctgcaataaattgctcgccattgggctacccatttgtcctaaaccgataaacgcgattgctgccataaccctctcctgaatacagttatgtcactttttgtcatttatgacatgctttgcttgtctgtttttgatcgtatttgtaatttatcgtcaaaaaattgacagccgtcactttttaaacaattggtgaaattaaaatgaacgcatcccaaaatgtttaaggaatgaccatgattcgtgttgcttgtgtaggtataaccgtgatggatcgcatctattacgtggaagggttaccgacggagagcggtaaatacgtggcgagaaattatacggaagttggtggcgggccagcggcgacggcagcggttgcggcggcaaggctgggggcgcaggtcgattttattggtcgcgtaggtgatgacgacacgggcaacagcctgctggcagagctggaatcctggggcgttaacacccgttacaccaaacggtataaccaggcgaaatctagccaatccgccatcatggtggataccaaaggcgagcggataatcattaactaccccagcccggatctgctgcctgacgcagagtggttggaggaaattgatttctctcagtgggatgttgtgctggcagatgtacgctggcacgacggcgctaaaaaagccttcaccctggcccgtcaggcgggtgtgatgaccgttctggacggggacattacgccgcaggatatcagtgagctggtggcattaagcgatcacgcggcctttagtgaaccgggtctggcgcgcttaacgggcgtgaaagagatggccagtgcgctaaaacaggcacaaacgctcacaaatggtcatgtctatgtgacccagggtagcgcaggctgcgactggctggaaaatggtgggcgtcagcatcaaccggccttcaaagttgatgtggtagataccacaggtgcgggtgatgtttttcacggcgctttggcggtggcgctggcaacaagtggggatttagcggagagtgtccgcttcgccagcggtgtagcggcgttaaaatgcacacgtcccggtggacgagccgggatccctgactgtgatcaaacccgatcttttttgagtctttttgtataaaatgccagggtgatggtttttcgaggaattttcatgagccttaccgaactaaccggtaacccgcggcacgaccaactcctcatgctgatcgccgagcgtgggtatatgaatattgatgagctggcaaatctgctggatgtctccacgcagacggtccgccgggatattcgtaaattaagcgagcaaggcctgattacgcgccatcacggtggcgcgggtcgggcttccagcgtcgttaatacggcgttcgagcagcgtgaggttagccaaaccgaggaaaaaaaagcgattgccgaagcggtggcagactatattcctgatggtagtacaatatttatcaccattggtacgactgttgagcatgttgcccgggcgttacttaaccataatcatttgcggataatcaccaacagcctgcgtgtggcgcatattctttaccacaacccgcgctttgaagtgatggtgcccggcggtacgttgcgctctcataatagcgggatcattggccctagtgcggcgtcctttgtggctgattttcgtgctgattatctggtaacaagcgttggggcgattgagagcgatggcgcgttgatggagtttgatgtaaacgaagctaacgtggtgaaaacgatgatggcgcacgcgagaaatattctgctggtcgccgatcacactaagtatcatgctagcgcggcggttgaaattggtaacgtggcacaggtcactgcgctctttaccgacgagctgccgcccgctgcgctaaaaagtcgcttacaagacagccaaattgaaatcattcttccccaggaagacgcgtaaatttttgtgaccgttaacctggcttcataccttgccacatagccaaacccatcctttcccgctacagttaatttcttgtggcgcgaaaggaggcaaaaatgctctatatctttgatttaggtaatgtgattgtcgatatcgactttaaccgtgtgctgggagcctggagcgatttaacgcgtattccgctggcaagccttaagaagagttttcatatgggggaggcgtttcatcagcatgagcgtggggaaattagcgacgaagcgttcgcagaggcgctgtgtcatgagatggctctaccgctaagctacgagcagttctctcacggctggcaggcggtgtttgttgcgctgcgcccggaagtgatcgccatcatgcataaactgcgtgagcaggggcatcgcgtggtggtgctttccaataccaaccgcctgcataccaccttctggccggaagaatacccggaaattcgtgatgctgctgaccatatctatctgagccaagatctggggatgcgcaaacctgaagcacgaatttaccagcatgttttgcaggcggaaggttttagtcccagcgatacggtctttttcgacgataacgccgataatatagaaggagccaatcagctgggcattaccagtattctggtgaaagataaaaccaccatcccggactatttcgcgaaggtgttatgctaaaaaccattcaggacaaagccaggcaccgtacccgtccactatgggcctggctaaaactactctggcaacgcattgatgaggacaacatgacaaccctggcaggtaaccttgcctatgtgagcttgctcagtttagtgccgctggttgccgttgtttttgcgcttttcgccgcttttcccatgttttccgacgtcagcattcagttacgtcactttatttttgccaactttctgcctgctactggcgatgttattcagcggtatatcgaacaatttgttgccaattccaacaagatgaccgccgttggggcgtgcgggctgatcgtcaccgcgttattgttgatgtactccatcgatagcgcgttgaataccatctggcgcagtaaacgagcgcgaccaaaaatttacagcttcgccgtgtactggatgattttaacgctggggccgctgctggcaggggccagtctggcgatcagttcctatttgctctccctgcgctgggcgagcgatctcaatactgtcatcgacaacgtgctgcgtatttttccgttgctgttgagctggatctccttctggttgctgtacagcattgttcctaccatccgcgtacctaaccgcgacgcgattgtcggcgcgtttgtcgccgcactcctgttcgaagcaggaaagaaaggtttcgcgctttatatcaccatgttcccgagttatcagctcatttatggtgtgctggcggtgatccccattctctttgtttgggtctactggacatggtgtatcgtcttgcttggcgcggaaattactgtcactctcggggaataccgcaaactaaaacaagcagctgaacaagaagaagacgacgaaccatgattgcattaattcaacgcgtaacccgtgccagcgtcaccgtggagggagaagtgacgggcgaaattggcgcgggacttttggtgttattgggtgtcgaaaaggatgacgacgaacagaaagcaaaccgtctgtgcgagcgtgtgctcggctaccgcatctttagcgatgccgaaggcaagatgaatctcaacgtgcaacaggcgggcggcagtgtgctggtggtttcccagtttaccctcgccgcagataccgaacgggggatgcgcccaagtttctccaaaggtgcaagtccggatcgcgcagaggcgttatatgactatttcgtcgaacgctgccgtcagcaagagatgaacacgcaaacaggacgcttcgctgcggatatgcaggtaagcctggtcaatgatggccccgtgacattctggttgcaggtatgagccagcttccagggttgagtcgggaaacaagagagagtatcgctatgtatcaccttcgggttccacaaacagaagaagaattagagcgttactatcagtttcgctgggaaatgttgcgtaagcccctgcatcaaccaaaaggtagcgaacgcgacgcgtgggatgcgatggcgcatcaccagatggtcgtcgacgagcagggtaatctggtggcggtaggccgactgtatattaatgccgacaatgaagcgtccattcgctttatggccgttcatcccgacgtgcaggacaaagggttaggcacgctgatggcgatgaccctggagagcgtggcgcgtcaggaaggcgttaagcgcgtgacctgtagcgcccgtgaagacgcggtggagtttttcgccaagctggggtttgttaatcagggagaaatcaccacgccaaccaccacgccgattcgccattttttgatgattaagcccgtcgccactctggatgacattctgcatcgcggcgactggtgcgcgcagctgcaacaggcgtggtacgaacatatcccgcttagtgaaaaaatgggcgtgcgcattcagcaatataccgggcaaaaatttatcactaccatgccagaaaccggcaatcagaatccgcaccatacgctgtttgccgggagtttattcagtctggcgacgctcactggttggggacttatctggctgatgctgcgtgaacgccacctcggcggaacgattattcttgcggatgcgcatatccgctacagcaagccgattagcggtaaacctcatgcggtagccgacctcggtgccttaagcggcgatctcgaccgtctggcgcgcggacgaaaagcacgggtgcagatgcaggtcgaaatctttggcgacgagacgccgggtgcagtgtttgaaggcacgtatatcgttctgcccgcgaagccatttggcccgtatgaagagggcgggaacgaagaagagtaactgatggagaggggcggtgctgcctctctcattcaggtcatttatattagtccttggctatttcggttatattaaataagaactctataaatttttattcttcgttggctccatacgtgtcttgctacatcactgttcaggagcatttaaatattatttgtagaactgagtggcaattatcgcagataatgcttaattcatcatcttagttcatgtttgagcgatttttgatagtcaaaaccccctctggtgccatacttttctcataaatatttttaaaatctatagctaacaaatattatgcaaagataatggactagcatcattgtcagtatcattcatttactgctctgtatgttatgaataattatgttgtatgtttgctcttaaaccgtgggaaggaggctataatggttgccaatattaatctcattaaacaagaaagttattctgttgttaatttagaaaaacaactttcccgaactgttaccaacaaaattataacgatgagcaagtaaagaccggttggtggcagtactgaccggtctgtgatgaaagattaatttcaccttaaatcctggtgctgttaggatgctgacgtttttcggctacaccattcagattatgcaaataaatatctctgaatataatatattcatagcacccataattcatcctgggcgataactaaaccatttttgagtaataaatgaaacaactgcaacactcttattatttctggaaaacgcctcgcaaaaacaaaacaacatgcaaaaatccgctttttttaaatgattttccggcgtaattttcgcacatacattaatgagtaatatatgtaaggtattggtaatggcgatgaatacggtttttcttcatttaagtgaagaggcaattaaacggctgaacaagcttcggggctggcgtaaggttagtcgatctgcaattttacgcgaagcggtagagcaatatctggaacgtcagcaattcccggtgcgtaaagcaaagggaggcaggcaaaagggggaggtagttggtgttgatgatcagtgtaaggagcataaggaatgacaaaaatttttcattcttgaatataaaaaacagatgcccttattctggtattaatacaaggctgttttacttgaacttataataactgcaactgttacatcatatctggaaaacgcctcgcaaaaataaaaaatgatgcgtaaatgagctttctttaaagattcggcaagggtacttttctctccatagattcaaaaatgatattggcgagatatttatgaactctctggcaggtatagatatgggcagaattttactcgatttaagcaatgaggtgattaagcaacttgatgatctcgaggtgcagcgtaatcttcctcgtgcggacctattaagggaagcggtagatcaatacctgataaatcaaagccaaacagcaagaaccagtgttcctggcatctggcaagggtgtgaggaagatggtgtcgaatatcagcgtaagctgcgcgaggaatggtaatgggaaaaaatgatgtcaatcagattgctgacaacgtgcgcgttgttcatgccggatgcggcgtgaacgccttatccggcctacaaagtcgtataaattcaatgtattgcagtttattggtaggcctgataagcgcagcgcatcaggcaatcttacgcttgtcatcagtctcatgcccataaccttattgatgtggtggtgggtaaattgaggccaaaccggcactggcggcatagcttgaggtggtaacgcggaatacgagagatggtgtcgtcacaccctatgagctgtaatccgggcgacctgcgccacccggaaaacgtcagagattactctccttcacccggaaacaggaacgggttgatggaactgcgggcatagccttcttgctccattcgtgcgtccagtaccagagaggcgaggtcatctgctacggcttcgatttttggatctttttcctgatagagaattttcaggtaagtgtcgcagtcatcgcagctttcggctttaatcgcggcctgttcgtcatccaggctccagtaatgcagtttgccgctctgctcgcagttgctgcattttacgcgcactacgtgccattcagtttcacacaggttgcagtgcaggtaacgtagcccctgagtggtgccaatttgcaccatgctggacaccggcatagaaccacaaaccgggcaatattgacgttgctcgccgtattcagcgcgggctttgccggggatcagattggccatctgcgcccagtagaggctcagtgcagcccagataaacggcgctttatcgctgctgacggagctgaaatcagaggcaaacagcgcgctggccatatcttccagctcctgagtgcttgccttctccagattctcaatcactgccagcgccgggccgctcatttcaggtttcagctcagcaatcagcgccatcagcagcttttgccagtgcttatcacgcggcagaacgtgaatatccagcgggggcttgccttgtgcgctggcttctttaatgcgcgcagtcagatccatctccagcggatggtcgtacagcaccacttcctgggcgtgggcgataagcgcagcaaagcgcaggtaatcacccagaggattattttctgccagctcgcgcagacgctcggcgcggcggttgtataaattcttgagccgagggaacaataacggcggaatcatatccgccgtacgtttctcgctactacccagctcatcttgcgggattatgcgaatactcattcagctttcttttccgttgtcttgcggacctcacggtaccagcgcgggtgatgtttcttcgcccaggcgctggtaacccatccttccaccatggcggtaatcgtgcctttcacccaaagggcggcgtagatatgcaccatgataaccacaattaacgccactgcggcaaaactatgcagcattaacgcgaatcggatcaccgggatactgaaagcaggcgcaaaataaggacgccagataatcacgccgctcaccagcagcagaaccaggaaaataatcgccgcccagaaaacgcatttctgaccgaagttataacgcccggtgtcacctacttcctcgttgacgacgatcttacgaatattcttcgcccaaaagatatcatcccgattgattaggttgtgatgccagtaacggaaaaacatgatgatgaagctggcaaacataaccacgccgacaaacgggtgcagaattcgcgccagctgcggtgtgcccatgatttgcatcaaccagttgaaggacgggaacaaaaagcccagcccgctcaccgccgccaggatgaagcagaaggcggtgatccagtggttgatacgttccggcgcggtgtagcgcacgatggtgtcacgtcgtttcatttgcgctcctcgtctttctcttcgtgcagattattctcttcctcatccgcacggttcggaccgacacccacgtagtggaagatactggccgcaaaggtagccgcaaagccaacagccgcgagcggtttccagatgcctttccagaatttcacggtttcgctgatttccgggttctccggcaagccatgatacagatttggcttgtcagcatggtgcagcacgtacatgacgtgtgtaccaccgacgcctgccggatcgtacagacccgcattgtcgtaaccgcgggttttcagctcagcaacgcgctcgctcgccagcgttttcatgctctctttcgtaccgaagtgaatcgcgcccgttgggcaggtcttcacgcaggctggttcttgcccaaccaccacgcggtcaacgcacagcgtacatttgtagacgcggttgtcttccgggttgaggcgcggaatgtcgaacggacagcccgcaatgcaataaccgcagccaatgcactgctcggactggaagtcgacgataccgttggcatactgaataattgcaccttccgccgggcacgctttcaggcagcctggatcggaacagtgcatacagccgtctttgcggatcagccattccagtttgtcgttctgctccacttcgctgaagcgcattaccgtccagcttttggcgcttaaatcattggggttgtcgtacaccccaatgttattgccgacggtatcgcgaatgtcgttccactcactacacgccacctgacaggctttacagccgatacaggtggtaacgtcgatgagtttcgccacttcttcctggaagtcccgcgcctgaggcgcgggggtcagaccgttagtcgcggaacgacgaatgatatcttgagattgataagccatatgtcgtctccgttacaccttttccacattcacaaggaaggacttaaactccggcgtctgcgtgttcgcatcaccaacgaatggcgttaaagtattggcaataaagccttttttagctacgccttcatagccccagtgaatcggaataccgatggtatcgatatctttgccgttcgctttcagcgtgcgaatacgtttggtcaccaccgctttggctttgatatagccacggttggaggagactttcacggtatcgccctgggcaatgccaagtttattcgccaggctctccccgatttccacaaactgctctggctgcaaaatcgcgttcaacagcgcgtgtttggtccagtagtggaagtgctcggtcagacgataggtggttccgacatacgggaacttatcggctttacccaatgcttcggcgtcgtctttaaagatacgtgcagccgggttgctgataacgtttggatgcagcgggttagttcccagcggcgtttcaaacggctcgtagtgttccgggaacggaccttccgccatcttatcgagggcaaacagacgccccatgccttcctgctgcatgataaacggcccgacgccgctacccggaggcgctgcgctgtagtccggaatatcccagccggtccacttagtgccgtcccatttcagcaactgacgcttcggatcccacgggttaccctgcggatctgcggaggcgcggttatacagaatgcggcggttaagcggccatgcccatgcccagcccagcgtgttaccgaggccagacggatcggcgttatcacggcgtgccatctggttgccttccggcgtccagctaccggcgaaaatccagcagccacaggaggttgtaccgtcatcgcgcaattgggcgaagctactaagttgttggcctttcttgacgataaccgcaccggttgccggatcggtaatatcggccagcgccttaccgttgctctccatcgccacttcttcactagatggctcatgcggaatggcgtagttccatgtcatgttcagcacctggtccgggttcgcgccaccctgttcggcatacatcttgcgcaagcgcaggaagataccggagaggatctcgccgtcagtcagcgcaatccccggggcgtccgcacctttccagtgccactgtaaccagcgaccactgttaacgatagaaccgttctcttccgcgaagcaggtgcttggcagacggaacacttcggtctggatcttgctgctgtcaacttcgttcagctcaccgtggttctgccagaagttagaggtttcagtgttcagtgggtcgatggtgacgaggaacttcagtttgctcagacaaccgatcactttgtttttgttcgggaaactggcaacagggttaaagccctggcagatatagccattgaccttgccctctttcatcatctcgaagtattgcaggacgtcgtagcctttatcccacttcggcaaccagtcaaagccccagctattttccgccgtcgctttatcaccaaagaaggccttcatcatagagacgaagaatttcgggtagttgccccagtagtttacctggccttccagcagcggttttggcgtgttggcggtaaggtaggtttgcagatcggtctgcttctcgcttggcagcgtcatgtaacctggcaggctctggctcagcagccccaggtccgtcagcccctgaatattggagtgaccgcgcagggcgttaacgccgccgcctgccatccccatattgccgagcagcagctggatcatcgccatcgtacgaatgttttgcgcaccaacggagtgttgcgtccagccgagggcatacaggaagctggcagttttatcgtgagcactggtttctgcgatgtattcgcagactttcaggaacgcgtcttttggcgtaccacagatgttttcaaccacatctggcgtgtagcgggaaacgtgctgtttcagcaagttccacacgcagcgcggatgttgcagcgtggtatcgcgtttggcgaagccgttttcgtccagttcataagtccaggaggatttatcgtacttgcgtttttccgcgtcgtagccggtgaacaggccatcttcaaagccgtaatcctcacgcacgatcaggctggcgttggtataggcttcggtgtattcgcggttgaatttttcattgttcagcaggtacagcaatacgccactcaggaaagcaatgtcagtaccggaacgaataggggcatagtagtcagctaccgccgccgtacgcgtaaagcgaggatcgatcacaatcagcttcgcgccgttgtgaattttggcttccatcgcccagcggaacccgaccgggtgagcttcagcggcgttaccgcccatcaccacgacgaggttggcgttcttgatgtcgacccagtggttggtcatcgcaccgcgaccaaatgttggagcaagacttgctaccgttggtccgtgtcagacacgcgcctggttgtcgaccgcgagcatacccagcgcgcgggagaatttttgcgttaaatagccggtttcgttactgctcgcggaagcacacagcatcccggtggagagccagcggttaacagtcacgccttcggcgttttgcgcaatgtagttagcatcgcggtcttctttcatcagtttggcgatgcgatcaaacgcctcttcccaactgatttgctgccatttatcagaacctggcgcacggtattccggaaacttcagacggctttcggagtggatgaaatccaccaggccagcgcctttcggacaaagtgcaccgcggttgaccgggtgatccggatcgccttcgatatggaagatagatgctttggcgttttttgctccgtcaccgaggctgtacatcaacagcccacagcctacggaacaataggtgcaggtattacgggtttcgcgggtgcgcagcagtttatactgccgggtttccgcgagtgctacgctgggtgcaaaacccagtgccgctgccgtggtgcctgccataccgccagcgcagatcttaaagaactgccttctgctgacctgcatggattgctccttgtttcgacattgtcacgtcccatttacattcgcttgctgcgtgtgcagggagtgggagttatttttctttgcggaaggggccgcaaaggtccagaattggctcaatttccctccatccaggaagggtttgtaacagaataccataatgttggtgtgtgtgttcttatctggttaagagaaagtgaaaaaaacacagcgaaaagaaatcgaaaatgtgacaaatatcacaggtgttcgtcaaattgagttatggcggcgtgatgatttacaacacccacggttagatgaggtcgcggaagaagttcccgttgcgctggtctacaacggcattagccatgtggtgatgatggcgagccccaaagaccttgagtactttgcgctcggttttagcctttccgaggggattatcgaaagtccgcgcgatatcttcggcatggatgtcgttccttcctgtaatggtcttgaagtacaaattgagctttccagccgccgctttatggggttgaaggagcgccgccgggcgctggcgggacgtacgggctgtggcgtatgcggcgtggagcaacttaatgacatcggaaaaccggtgcagccgctaccgttcacccagacgtttgatctcaacaaactggatgatgcattacgtcatctcaacgattttcagccagtggggcaactgactggttgtactcacgccgctgcctggatgttgccatctggcgaactggtcggcgggcatgaagacgtgggtcgccatgtggcgctggacaaactgttaggccgccggagtcaagaaggggaaagctggcagcaaggtgcggtactggtttccagtcgtgccagttatgaaatggtgcaaaagagcgcgatgtgcggcgtagagattttgtttgcggtgtctgccgcgaccacgcttgctgtagaagtggctgagcgctgtaatctgacactggtaggtttttgtaaaccgggtcgggcaacggtttatacccatccgcagcgtttgagcaattaattaaaataagtcctgcgaaatatattaaattgcaggacttattcatttcgtgaattttattattttatttataaacaaaatgcgtgtagtggcgttttcttttttcatttattatgttcactctcttatctatatatttataaggcaattaaatgaaaaggaatttattatcttccgctattatagtcgccatcatgtccctcggtctgacgggttgtgatgataaaaaagccgaaacagaaacgctcccgcctgccaatagtcaacctgccgcaccagctcctgaagcgaaacctactgaagctcccgttgcaaaagcagaagctaaacctgaaacacctgcgcaaccggtggtcgatgaacaagcggttttcgacgaaaaaatggatgtctatatcaagtgctacaacaagttacagatcccggtacagcgcagtctggcgcgttatgctgactggctgaaagattttaaacaggggcctaccggtgaagagcgtactgtttatggcatctacggcattagtgaatccaacctcgctgagtgtgaaaaaggcgtaaaaagtgctgtggcgttaacgcctgcgctgcaaccaattgatggcgtggcggtgagttatatcgatgctgccgtggcgttgggtaataccattaacgaaatggataaatattacacccaggaaaattataaagacgatgcgtttgcgaaagggaaaacgctgcaccagacattcttaaaaaatctggaagcctttgaacctgtagccgaatcttatcatgcggcgattcaggaaattaatgataagcgtcagcttgcggaactgaaaaatattgaagaaagagaagggaaaacattccactactactctctggcagtcatgattagtgcgaaacaaattaataacctgataagccaagataagtttgatgcagaagcggcaatgaagaaagtgtctgaactggaaacgctagtggcgcaggccaaagaagcggataaaggcggcatgaatttcagctttattaatagcgcaggccagtatcaactcgaggctaaaaaatacgttcgccgcatcagagataaagtcccgtactctgactgggataaagagcaacttcaggacgcaaacagtagctggatggtcgaagactctttcccgagagcattacgcgagtacaacgaaatggttgatgactataatagcctgcgttaaacgtttttgatgataaatgcagtgtcggatgcggcgcatccgacacagttcaccccttgtgaagtaactccataaatgcctcatatcctgttaacccggcaataatctccgccggatgctgacacaatatgcttgccagatagctaaatatttttagctcatgacgcgcatcggcggcggcgcaggcgatcaagacatggttaatgacttcgttattcacctcaactggttgggcgagggtaataaaaaatccacgaaaacgtcgctcctgttcgctccagcaatgtgggatggcgaggcgattaacaatcaggttttcaccttcgccttcgcgggcgatgatgcgttgtgcttcatcggcggtaatatggtgttgtgcgactaattgcgcacaaatttgccgggtaatatgttgccagctttcaccgcgtacattgctataatgaaaacttccgggggcagagaaaaaacgctccggctgttggcgaataaatgccgtcgccagaaaatgttttatttgttcgataccggcagccgtaatgatattttttacggtgatgtaattatttaccgcgtcatccagtaaataatggctgttgttaatgatcaataacggctcaatctcttcgcgaatggcaacaagttcgcttaagctacgggcaataattacccgacaatttaaaacatcgcgctcaatggcgagctgattaatagtggcaatcgcgttctggtcgctgagcaaaatgatcggctggcgttcgttttgatgccgctccagcgcacaggcaaaatacaaaccgatcagatcgctgtcgaaaaggggaatatcgagctgttcacgcagtagcgtaataaagtgcagactcatatcaaaggccgcaggccaggcggctttcaggttattcatgctgctctggcggtgctcagcaatccacactggtgcggcaaggcaacgtaataaatgcccggtaatattctcaaccagctgcgcatcaataatattcaaactcgcgatgcccggcaccctttgcagcaacccctgcacattatcggcactaattacctgcgcttgctgatgctgtttctctatcaaacccgtcagggttcttacagcgttatcaccaagaaacagaccgctatgttcaacgatttgttttatctcgtcaccgggatattgcggccactcatcggtcagttgattacgcagggcgtaaatcgccagaatcaggctggagagataatcaccctgcatgagcggccagcggtgttggttgtcgcaggccgtggataaatgctgaaggttgtctcgtgttatgcccgccagcggaattaaaaacggatctttgcgcagcaagttcgccagcaagataacgcgtttctcttctgtctcatcaatgaaatggcccaaaccagggcggctggccaggcaacaagtgcgttcataacgctgttttaaccggggcagacgctctgctacccacgtttctggcaaattaagcgcgctggcgagttgcgcacggggagtgaaagtattcagtaataacagcgccagcagccgatcgtcgttatcgtgcttttgcagcaactgaaaaaagctgcggcgctcgaagatttccagctgatagcccgcactgccactggcgaaaatgcgggctttgccgttaagggtgaagttgagatagtcaatatcacgcaggatggtcctgccactaacgccagtctgttgcgccagctcgccaggcgtgcgcggctgttgctccagcagatcgacaatctttaactggcgttcgtttagcattaatccacctgacggaactggctaaacgcgttgactttctccgcagttaaggtcgtcagaaaaccccgtatcagcgtgagcagagcttcgtaatcggctttactaatcataccgctgttggcgtgcagataacgagttggcagacacagcgcgacaaccggacgcccgccgcccatcacgttgtagcgcccgccatccgtcgcaccggttttcatggtggaaaattgcagcggtaaatcgttatgtgcggcacagctttttaacgctgctaccagtttctggttggggaagtagcgcttgtcaaacagcatcagccccggcccctggcccagtttcagcgggtatttaatgttatcaatgcccggaacatcgcccgctacggcggtatccaacacgatcacgacgtccggtttaatgtgttccgcgctggtttgcgccccgcgtagcccaacttcttcttccacactgccaacgccatacagcgtaatttcgggattattcaccgtctgcaatagttcagccatcattgcgcagccgatgcggttatccaacgccttgccgaccactttatcttcgccccagcaggcaaaattggcttccgggctaataaaattaccaatttccacgccgcgcttttccacctcttcgcgactgttcgcgccaatatcaatgaacatctcatcaaaactcagcggttgttgcttttgcttttccgttaacgcatgaggcgcgacggaaccaatcacaccagggattttcactcccttgtgtgtgcgtatggttacccggtggttgagcatgctctgattccaccagccgccaatggtggtaaaacgcagaaaaccgctctcgtcgatgtgggtgaccataaagccgacttcatccatatgtccgacaacggcaacttttggacctttattccccttacgggcaacaaagctgcccagaccatcgaaggtgatttcattcacgcaaggttccagcgtgtttatcagaatgtcgcgaacttcctgttcatcgccgctgacggcgctggcttcgcacaactgttgcagtaactcaatgttcatggacaagctcctgttgcgcggctttcgctttgcggcgtaaccacaatcctttcaggacgataatgaaactaatgttcagcgcgaggccaatcgccagcaccagataaaagctacccaccgggctcatcaggccgatcagcgggtcaaagatacccaaaccaggtgccagacgtttgattccgaaagcgatcaccagcacgccggtaatgccgcccgccagcgtattggcggtaatcatcggcaacggagctgccagagcgtaaggaatagccggttcggttgcgactgtggcaccgaccacaatggcactactggcagcctctttttcctgtcgggtaaacagtttgggcgcaatgaacgtcgcaagacccgccgcgacgggcggcatcagcgcgacaacgccgacgatggcgtaccagtcataaatgtgtttttccagcagactgaagcagaagaaccaggcggttttattgatggggccgcccatatcgaacgccagcatcgcaccgaccagaaacgctgccgcaaacttcatacttggaggaatggtattcaggaagtggagcagcccgcccatgaggtcggacatcaccggcccgataacgtagtaagtgagcacgccgaaaaccagcagagtaacgaacgggatcagcatactaccgagcagcggttgtaatgctttgccaaggcgcactttgcggaaccagaagacgaaatagccaatcgccagccccagcaccaccgcgccgaggaatcccgcaccgctctgggtgccgagcagcgctttgtcgttcgccagatagcaaaccagaaacgccggagcgaaagccggtttatcggcaatgctgctggcaatataagcgcccatgatggggatcataaaggtgaagccaaggtaaccgatggattcaactacccaggtaaagctcggcgcgcctttgctcatatcggtatacggcaaaccgaactgcaccagcatgttggcaagcgccaccaggataccaccgccgatgacaaacggcagcgccgcagagacgcccgccatcaggtggctcatcacgctaccgctttgcacttcctgtttgccaagcttcacgccgctatctgcggcaaaaagctggctgtttgtcggtaattcgctgaaaatctggtcgatatttttcaacgcctgggagatggcaatctcataaactttcttcccggcaaaccgcgcgcgatcatcaccgctcaggccacgcccggtagcgagaatgacgtaatcggcagcggcaatctcttcgctggataagcggttttcaacgccactggacccttgagtttccacttttatggtatgaccgagagaacgggctttctgttccagggcttccgccaccatgtaggtgtgagcgatcccggcggggcagttggtgatcgcgacaatacgtaaggaactctccatcgccacttccttaactgctgagggtttgatttaacaaggcaagcacctggtcggtatcgccctgttgcagttgatgaataaattccttgtgaataattttgcgacacagtgtgccgatgattttgacctgatcctcttcgccgctttgcggcacgccgaggcagatccagcaattgacgtcttcgccatcgctggctttccagtcaatagcctgcgctttgcgggcgaataatacgaacggttgtttaacgcaggcgcttttaccgtgcggcacggcgacaccggaaccaaatccagtagagtgcattttttcgcgcagcagcagggtttgcaggaactggtgactgtcggtgataaaaccgttttgtaacgctattgtcgccaactgcttcagaacggaataagcgccattgccctgaatattcaggtcaatacagcttgcagtaagagctgccattaatcggactccataaaatatattttaatcaattgtaatggtggagcgattaagtgatgagaggcgatatgtcggtaaacaatgacaatttgagacagagtgaaaggtcagatttgcggagtaatgcacataatggttatttaaataaaccacatgaatcattaatgggttattcattatttttgtgatttactcacaatgtatcagggaaatataacttaccgggagatgtaatatgtttaatttttcaaatcgaaatttaaaatattgtgccggaggcatctctggcacattgggcaattacggcaggtaaaacacttcttgcagctcgctactcaccgggctgttatccgggttagcgggcataacatcggtcatatatttccaccaacgttggcagacatcagtgctggcaaccgcattccagcgttcttcagattcaatctctaccatggcaaacagcagattacgcgctttgtcgagatagatggcgtagttatgcgcaccgtgagatttcagcactgcttccagttctggccagatgggattatgccgacgctgatactcttcgtgggcgtcggggtttacctgcatgacaaaggctttgcggatcatgtttgctccttacagcgccagcgcactggcgagtggcgtaacgccgaaacgcttgccgagcgctatcaactcttcacggctgatggtctgtttcatgccgcccatgctataaaccttcactaatacttgtgcacttttttctgcggtgtcgattaaaccgaaggtttcatccagcgtcggtccgctgccgaagacgccgtggaagggccacaacaccaggctatgtttttgcatctcttgtgcggtcgcctggccgatttcgtccgtgccgggcaccatccacggcaaaatgccaacgccatccgggaataccaccagacactcggtgctgccttcccacagttggcgagtgaagaccgcggtgtcgttttcaagtacataggtgagggcgatcaggttggtggcgtggcagtgcatgatcacccgatctttgccgttggtggctttaatgcgctcgcagtgggaaaggaagtgagccggaagttcggaagtggggacggcttcgttggttaacccccaaagaatgtggtagcccgcgccgtcgctgtcgacttttacgatgcctaagttagccgcaggatcaagctggacgttacggaagaatttgccgctgccggtgacaataaacggtgtatttgccagtaaaggcatgggctggctgagcgggatatagcgcggttgttggtggaaattgtcgtgatatggtgcgatatcggcgtcatccaggcgtagcgtcaggttgccgccgttgcgctcatcccagcctttcagccaggcgtcggtggtggctttgatcattccctggacaaaccaggactgagtaatgttttgcatgttctgtgttcctgtaaattcggtgttgtcggatgcacgacccgtaggccggataaggcgctcgcgccgcatccggcaatcaatgcctgatgcgacgctgtcgcgtcttatcaggcctacaactattgccgacctgtaggcctgataaggcacttgtgccgcatccggcaatcaatgcctgatgcgacgctgtcgcgtcttatcaggcctacaactgttgccgacctgtaggccggataaggcacttgtgccgcatccggcaatcaatgcctgatgcgacgctgtcgcgtcttatcaggcctacaactattgccgacctgtaggccggataaggcacttgtgccgcatccggcaatcaatgcctgatgcgacgctgtcgcgtcttatcaggcctacaactgttgccgacccgtaggccggataaggcgctcgcgccgcatccggcagtgtttacccgcggcgactcaaaatttctttctcataagcccgcacgctctccagccattcgctacctgctggcgtatcgtgacgttggcaatacatttcccagaccgcctgccacggcaagcttttctgctcttccagcagtgccagacgcgcagtgtaatcgcccgccgcttccagcttgcgcagctcagcggtaggttccagcaacgcacgcagcagggcttttttcatattgcgtgtaccaatgacccacgcggcaatgcggttgatagaggcatcgaagaagtcaaggccgatatgcacccggtcaaacagatcgtgacgcacaatctcactggcaattgcctgggtttcatcatccagcagcactacgtgatcgctgtcccagcgaaccggacggctgacgtgcagcagcaactgcggcacatacagcatggcggcggaaatcttgtcggaaatcacttcagtcgggtggaagtgcccggcgtccaggcacagcgcagtctggcggctggtggcataccccatgtaaaactcattggagccaaccgtgtagctctctgcgccaatgccaaacaatttgctctcaacggcgtcgatatggtgcgcagggtttagcttctcgctgatcacctcatccagtgctgccagcagacgctgacgcggggcgagacggtcaacggtgatatctttcataccatccgggatccagatgttcatcacgcttggtgtgccgagttgctcgccaaaataggcgctaacgcgacggctggctttgcagtgatcaatccagaactggcgaatgctgtcgtcggcatgggaaagcgtaaagccatcggcgcttagcggatggctaaagcaggaggggttaaaatccagaccgagctgattggctttcgcccattcaacccagtttttgaagtgctctggtttgatctggtcgcggctgactggcgtatcactttccagatagatggcatgtaaattaagccgtttcggccccggaatcagccgcatagcctgttccagatcggcacgtagctcactggcattacgcgctttgcccggataattgcctgtggcctgaatccccccggtcaggctaccttccgggttttcaaaaccggaaacatcatcgccctgccagcagtgcatactaacgggtaaacgatcaagttggcgcagcgcctcctcgacatcaatccccaccgccgcgaaacgctgtttcgctagctcccaggcctgttccagttgagtggtcatgcgcaaagctcctttgtctgtcgtgtagagtgaatctgcgccacatagtgggcaatttcactgtcaggattaggggtaaaggtggtcagattcgcggtggtgctgacgacctgacggaaatcatccacattgttgagttcatccagcgtcattaactggatgccgatattgccgagcgtgctggcttcaacaggcccggcgatcacccgaataccgcaggcatcggcgcatagctggttgagcagcgtgttctggcagcctccgccgacaatatgcagttggctgaaatcttcaccgcgcagctgcgccagctcatgcaacacatcggcatacagcagcgccagactgtcgaaaatgcagcgcgccagttcagcatcactttccgggatcggttgcgccgtttcccgacacgcagcctgaatttcgctgcacatcgtctcaggattaataaagcgatcgtcattgggattgataatgaagcggcaagccggaagtgcctgtgtcgcggagataagcgccggaagatcgttgatttgctgctcctgaagcactcgctgaagcagccataagcccataatatttttcagcacccgatagcgaccttccgccccgccttcattggtgatgttggctgccagtgccgtgtcattggtaaatggcgtctggctttcgaagcccatcaaactccaggtgccagaagagagataagcagcacgactgccgtttaacgggctggcgataaccgcgctggcggtatcatggctggcaacggcgaccactggaatctcattaccctgcgggcaaatccagtgacctatgacattacccggatgcgtcgggcgaccaaaccaggctttgttggccccgctccacgccagtaggctctcgtcccagtcgtcgctattgatattgaccagttgcgtggtcgtggcgttggtatattcccagttcatcttgccggtcaggcgataactgaagtaatccggcatcagcagagcgtgagcaatgtgtggaataagttcaggttgttgctccgtcagcgcacgcaactgataaagcgtattgaagggcagaaactggatgccgctacgttgataaatatcgcgtttgccgagttgttgttgtgcctgcgccattaggccattggtgcggctatcgcgataagcaacgggcaggcccacacgctgaccctgttggtcgagcagcacaaagtccacgccccaggtatcaatcccaatgctatcgatacgaatcccttcctcgcacaccttgtttaatccaaggcgaatggcactttcaaggctatccacatcccaggtgacatagccgttctgactatgcagcccattgttaaaacgatggatttcgcgcagcgtcaggctgcggcattcacgctcgtaacgcgccagcatcacgcgcccactggatgcgccgagatcgacggcgacacaattgcgaaaggtcataatgtgatcctgctgaatttcattacgaccagtctaaaaagcgcctgaattcgcgaccttctcgttactgacaggaaaatgggccattggcaaccagggaaagatgaacgtgatgatgttcacaatttgctgaattgtggtgatgtgatgctcaccgcatttcctgaaaattcacgctgtatcttgaaaaatcgacgttttttacgtggttttccgtcgaaaatttaaggtaagaacctgacctcgtgattactatttcgccgtgttgacgacatcaggaggccagtatgaccgtattacatagtgtggatttttttccgtctggtaacgcgtccgtggcgatagaaccccggctcccgcaggcggattttcctgaacatcatcatgattttcatgaaattgtgattgtcgaacatggcacgggtattcatgtgtttaatgggcagccctataccatcaccggtggcacggtctgtttcgtacgcgatcatgatcggcatctgtatgaacataccgataatctgtgtctgaccaatgtgctgtatcgcagcccggatcgatttcagtttctcgccgggctgaatcagttgctgccacaagagctggatgggcagtatccgtctcactggcgcgttaaccacagcgtattgcagcaggtgcgacagctggttgcacagatggaacagcaggaaggggaaaatgatttacccagcaccgccagtcgcgagatcttgtttatgcaattactgctcttgctgcgtaaaagcagtttgcaggagaacctggaaaacagcgcaagtcgtctcaacttgcttctggcctggctggaggaccattttgccgatgaggtgaattgggatgccgtggcggatcaattttctcttagtctgcgtacgctacatcggcagcttaagcagcaaacgggactgacgcctcagcgatacctgaaccgcctgcgactgatgaaagcccgacatctgctacgccacagcgaggccagcgttactgacatcgcctatcgctgtggattcagcgacagtaaccactttagcacgctttttcgccgagagtttaactggagtccgcgtgatattcgccagggacgggatggctttctgcaataacgcgaatcttctcaacgtatttgtacgccatattgcgaataatcaacttcgttctctggccgaggtagccacggtggcgcatcagttaaaacttctcaaagatgatttttttgccagcgaccagcaggcagtcgctgtggctgaccgttatccgcaagatgtctttgctgaacatacacatgatttttgtgagctggtgattgtctggcgcggtaatggcctgcatgtactcaacgatcgcccttatcgcattacccgtggcgatctcttttacattcatgctgacgataaacactcctacgcttccgttaacgatctggttttgcagaatattatttattgcccggagcgtctgaagctgaatcttgactggcagggggcgattccgggatttaacgccagcgcagggcaaccacactggcgcttaggtagcatggggatggcgcaggcgcggcaggttatcggtcagcttgagcatgaaagtagtcagcatgtgccgtttgctaacgaaatggctgagttgctgttcgggcagttggtgatgttgctgaatcgccatcgttacaccagtgatagcttgccgccaacatccagcgaaacgttgctggataagctgattacccggctggcggctagcctgaaaagtccctttgcgctggataaattttgtgatgaggcaagctgcagtgagcgcgttttgcgtcagcaatttcgccagcagactggaatgaccatcaatcaatatctgcgacaggtcagagtgtgtcatgcgcaatatcttctccagcatagccgcctgttaatcagtgatattagcaccgaatgtggctttgaagatagtaactattttagcgtggtgtttacccgggaaaccgggatgacgcccagccagtggcgtcatctcaatagccagaaagattaattcgccatgccgatgccgacgatgttagcggcgacaataatcaccacacaaccgaggctcaacaccgttaccggacggcgtcctgcattgttccactctttcagcaccagcccgacgataccgccgcacaatacatagaaactcatatgcagcatccaactgatgtagtcatactgcgccggaatgcgggcgtggccccaggcatagaaaaagaattgcagataccacatcaacccgcccagtgtgctgagtaacacattgtgaatgatcaggctttttgccaggctgaagtcggcttttaggctcaaatccttcacttttgccagacgaataaaacagaaaccgaggttaatgatcgcgccgccgcccatgatgacaacatagcttggcagagcgacatacagtggatcgacgccaagtgcggcagcggcttcatgcatcggttttgcggcgttcatcgcaaaggacatcccggcagagaaaatgccgcacatcaccgccagcaccagcccttttttcagattgaactcttcggctttaatgcccatcttgcgctctttcaactgcccggcgcgagttacaatccctacgccaatcagcgccaccagaacgccgagcaacgtcatgcgtccgccttcggtgctaatcaacacatcgaaattgccgttgataattggcgtcatcagcgtaccgacaatcaacgtaatgccaatggcgatgccaattcccatgctcatgccgagataacgcatggtcaggccgtagttgatattaccgatcccccacatagcgccgaacagaaaaacaggcagtcgcgtagagagactaaagctgctgtaatacgcccagaaattcggtagtaacagggcgctgatggcccacggcagaataatccagctaacaatcccaccgacactccacatggtttcccaactccatttttttacttttttgaacggagcgtaaaaacaggctgcactggccgcgccgatcaaatgccaaaatatccccatcgtaatcgcgttactcatcttcttatcctcatcatttttcgtcgcgtcacatctccgacgagatgagtgtaaaaatcgtgctgtcgattaacctttcgcctgttgccgccgttgtcgatttactggcaatcacggcattaagtgggtgatttgcttcacatctcgggcattttcctgcaaaaccatacccttacgaaaagtacggcattgataatcattttcaatatcatttaattaactataatgaaccaactgcttacgcggcattaacaatcggccgcccgacaatactggagatgaatatgagctataccctgccatccctgccgtatgcttacgatgccctggaaccgcacttcgataagcagaccatggaaatccaccacaccaaacaccatcagacctacgtaaacaacgccaacgcggcgctggaaagcctgccagaatttgccaacctgccggttgaagagctgatcaccaaactggaccagctgccagcagacaagaaaaccgtactgcgcaacaacgctggcggtcacgctaaccacagcctgttctggaaaggtctgaaaaaaggcaccaccctgcagggtgacctgaaagcggctatcgaacgtgacttcggctccgttgataacttcaaagcagaatttgaaaaagcggcagcttcccgctttggttccggctgggcatggctggtgctgaaaggcgataaactggcggtggtttctactgctaaccaggattctccgctgatgggtgaagctatttctggcgcttccggcttcccgattatgggcctggatgtgtgggaacatgcttactacctgaaattccagaaccgccgtccggactacattaaagagttctggaacgtggtgaactgggacgaagcagcggcacgttttgcggcgaaaaaataatcatttgccgcctgctgcaatgaggcgtataggccgcatatcagcttaaaaaatgaaccatcgccaacggcggtggtttttttgtgatcaatttcaaaataaaaacaatgatccgataaaaataaaacagcgtttcaattgatgtggttttgatcacttttattgattaaatgaatgtctatcttcgtttccatcaacactgatgctccattgaggaattacgcatcagcccttaaaaatatgccgacaggtgatggaaatgcagataaaacgcagcattgagaaaatcccgggggggatgatgctcgtcccgctattccttggcgcactgtgccacaccttcagcccgggggcggggaaatattttggaagtttcaccaacgggatgattaccggtacggtgcccattctggcggtgtggtttttttgcatgggggcgagtataaaattaagcgcgacgggaacggtactgcgtaaatccggtacgctggtggtaactaaaattgccgtcgcgtgggtggttgcggcaattgccagccgtattattccggaacatggtgttgaagttggattctttgccggacttagtacgctggcgctggtggcggcgatggatatgaccaatggcggactttacgcttccatcatgcagcagtacggcacaaaagaagaagctggggcatttgtgttgatgagcttggagtccgggccgctcatgacgatgattattctgggcactgccgggattgccagctttgaaccgcatgttttcgtcggcgcagtattaccgttcctggtgggctttgccctggggaaccttgaccctgaattgcgagaatttttcagcaaagcggtgcaaacgctgattccattctttgccttcgcgctgggcaataccattgatttgactgtgattgcccagactggtttgctggggatcctgttgggtgtggcagtaattatcgtgaccggtattccgttgattatcgccgataaattgattggcggtggcgatggcactgccggaattgccgcttccagttccgcaggggccgcggtagcgacacctgtgctgattgcagaaatggtgcctgcgtttaaaccgatggctccggcagcaactagcctggtagcgacggcggtcattgtgactagcattctggtgccaattcttacctctatctggagtcgtaaagtcaaagccagagcagcgaaaatcgaaattttaggtacggtgaaataaacctgcttccttaatccccacagccggatgaactaacgttcgtccggtttgctattgagttcctgcctggatacttaccgcgaaaacagcacgcctgacataaaataaatatggtctaatggggaaatttctcgtggagagggaacagatgcgatatccggttgatgtatacacaggcaagattcaggcttatcccgaaggcaaacccagcgcaattgctaaaatccaggttgatggtgagttgatgctgacggagctggggctggaaggtgacgagcaggcggagaaaaaggttcacggcgggccagacagagcgctgtgtcattatcctcgtgagcattatctctactgggcgcgggaatttccggaacaggcggagttgtttgttgcgcctgcgtttggtgaaaacctcagtaccgacggcctgacggaaagtaatgtttatatgggcgatattttccgctggggagaggcattaattcaggtcagccagccgcgcagcccttgctataaactcaattaccattttgatatcagcgatatagcgcagttgatgcaaaacacaggtaaggtggggtggttgtatagcgtgatagcgccagggaaagtgtctgcggacgcgccgctggagttggtttcccgtgtcagcgatgtgaccgtgcaggaggctgccgccatcgcatggcatatgccgtttgatgacgatcaatatcaccgtttactctccgctgccgggttaagcaaaagctggacgcggacgatgcaaaagcgccgactgagcggcaagatcgaagatttttcccgccggttgtggggaaaataacccccggagtgtaggcctgataagacgctatcagcgtcgcatcaggcatcctgctcaaatgccggatgcggcgtaaacgccttatcctgcctgcaaatgcgaagtttaactccgcttatacagcggcaaccaaatcaccagccgtaaaccgcccagcgggctgtcttctgccttcacccagccacgatgctgctgaatggcggtttcaacaatcgccagccccaaacctgtaccgccagattcacgatcgcgtgcttcatcggtacgatagaacggacggaaaatctgttcgcgatcttccgggctaacgccaggaccatcgtcgtccaccgtaatggtgataccgtctttatctaccgcaaagcccacttcaatcttcgtatgggaataacgcagagcattacgaacaatgttttccagcgcactttccagggcgttcggattgccgtacagcggccacggcccaggcgggaagttaactgtcaagctcttgcccatttgctcggcttcgaacgccgcgttatccagcacttcactccacaactggttggctttgatggtttcgctaaccagcgcgtttttttgctgattacgactcatcaccaacagatcgttgatcatgctgtccagacgttgcgcttcggtttcaatacgctccagttccttgctttcaccgctacgacggcgcagtaacgccgtacccagttgcagacgcgtcagcggggtgcgcagctcgtgagagatatcagaaagcagacgctgctgagaggtcatcatgcgctccagcgcggtgaccatctggttaaaactggcacctgcggcaaggaattcctgtggccccgcttccagttccgggtgctggcgtaagtttccctgggcaacttcatcggcagcgtttttcagcttacgcgccggttttgccagactccaggccaaccacaacagcagcggcgtactgaccaacatggtgacaatcagcagtaatagcgggcggtcaaacagtaagttaatgaaatcggattgagaactgctggccggacgaatcagataaagttggtaattatcttcgccatcacgcacggagaacggaccgaccagttccacgcggccatactttttcttctgcggatgatcggcgttatcggcctgaccaataaagttacgaatgatctgcatttcgctgcgttcagcgccgatcacgcggccttcggtggtcaccaataacaaacgctgtcctggcggtgcccacttatcaatcgcccggaacagacgccgccaccacattaaatcgttgggcggatcgttcgccagctccgcttcgacatgctgctcaatcatcagcccctgacgctgttcgctatccagaagctcggtcatctggcgactatcgagcttgggtaacatcaaaaccaacatcaacaccagcgccagcgtcagccagaagatggcgaagatgcgcgcggttaagctgcctatcatgaagcagaaaccatcagatattagctcaactagcagaaaccatcagatagccgcgaccacgcaaggttttaaaccacgggtgaccatctttacgatccggcagtttacgacgcaggttggaaatgtgcatatcaatagcgcggtcgaaaggcgtcaggcgtttgcccaacacttcctggcttaaatgttcacgggaaaccacctgacccagatgctgtgccagcaaatagagcagggtaaactcagtaccggttaactccagcgtttgcccgtcgaagctggcttcctgacggcctggattcagcactaaggcatcaacttccagtgtcggactaccgttgtcgttgttttgctgttgctcgctccagtggctacggcgcaggatcgcgcgaatacgtgccaccagctcacgatcattaaacggtttcgggagatagtcatctgcgcccagctcaaggccgagaacgcgatcaagttcactgccgcgcgccgtcaacataatgacaggcgtctggtgtgtctggcgaagtgcttttaatgtgtcgataccatttttcttcggcatcattacgtcaagcaaaagtaaatcaatgctgtcgtccagaagatcaagcgcctgttccccatcgtgggcaacaatcacgttgaagccttccatctcgagcagctcctttaatagggaagtcagctctcggtcatcatcaactaacaggattttattcattgtttaaatacctccgaggcagaaattacgtcatcagacgtcgctaatccatgactttacgttgttttacaccccctgacgcatgtttgcagcctgaatcgtaaactctctatcgttgaatcgcgacagaaagattttgggagcaaatgatgcgcatagttaccgctgccgtcatggccagtacgctggcagtcagtagtttaagccacgctgctgaagtcggtagtggcgataactggcatccgggtgaagaacttacgcagcgcagtacgcagagccatatgttcgacggcataagtttaaccgaacatcagcgtcagcagatgcgagatcttatgcaacaggcccggcacgaacagcctcctgttaatgttagcgaactggagacaatgcatcgccttgtcaccgcagaaaattttgatgaaaacgctgtgcgcgcacaggcagaaaaaatggcgaatgagcaaattgctcgtcaggttgagatggcaaaagtccgcaaccaaatgtatcgcctgttaacgccggagcagcaagcggttttaaacgagaaacatcaacaacgaatggagcagttgcgtgacgtgacgcaatggcaaaaaagtagtagcttgaagctattgagtagtagcaacagtcgttcccagtaataaaccctgttttccttgccatagacaccatccctgtcttcccccacatgctgtgggggttttttttatcctcaatttgcctgctgcttaatgcattgcagatgatttgcttccgttatactagcgtcagttgatagcgggagtatttatgaatcaatcttatggacggctggtcagtcgggcggcgattgctgcgacggcgatggctagcctgctattgctgattaaaatttttgcatggtggtataccgggagcgtgagtattctcgccgcgctggtggatagcctggtggatatcggcgcgagcttgacgaatttattggtggtgcgatattccctgcaacctgccgacgataatcacagctttggtcacggtaaagctgagtccctcgcggcgctggcgcaaagtatgtttatctccggtagcgcactattcctgtttttgacgggtattcaacatctgatatctccaacaccgatgacagatccaggcgtcggggttatcgtgacaattgtggcgctaatttgtacgattatccttgtcagctttcagcgttgggtggtgcggcggacgcaaagccaggcggtgcgggctgatatgctacattaccagtctgatgttatgatgaacggcgcaattctgctggcgctggggttgtcctggtacggctggcatcgcgccgatgctctgtttgcattgggaatcggcatctatattttatatagcgcgttacgcatgggatatgaggcggtacagagtttactggatcgcgcattgcctgatgaggaacggcaagaaattattgatatcgtgacttcctggccgggtgttagcggcgctcacgatcttcgcacgcggcagagtgggccgacccgctttattcagattcatttggaaatggaagactctctgcctttggttcaggcacatatggtggcggatcaggtagagcaggctattttacggcgttttccgggaagcgatgtaattatccatcaggacccctgttccgtcgtacccagggagggtaaacggtctatgcttagttaatcagtataaaagagagccagacccgcattttgtgtataaaataccgccatttggcctgacctgaatcaattcagcaggaagtgattgttatactatttgcacattcgttggatcacttcgatgtgcaagaagacttccggcaacagatttcattttgcattccaaagttcagaggtagtcatgattaagaaaatcggtgtgttgacaagcggcggtgatgcgccaggcatgaacgccgcaattcgcggggttgttcgttctgcgctgacagaaggtctggaagtaatgggtatttatgacggctatctgggtctgtatgaagaccgtatggtacagctagaccgttacagcgtgtctgacatgatcaaccgtggcggtacgttcctcggttctgcgcgtttcccggaattccgcgacgagaacatccgcgccgtggctatcgaaaacctgaaaaaacgtggtatcgacgcgctggtggttatcggcggtgacggttcctacatgggtgcaatgcgtctgaccgaaatgggcttcccgtgcatcggtctgccgggcactatcgacaacgacatcaaaggcactgactacactatcggtttcttcactgcgctgagcaccgttgtagaagcgatcgaccgtctgcgtgacacctcttcttctcaccagcgtatttccgtggtggaagtgatgggccgttattgtggagatctgacgttggctgcggccattgccggtggctgtgaattcgttgtggttccggaagttgaattcagccgtgaagacctggtaaacgaaatcaaagcgggtatcgcgaaaggtaaaaaacacgcgatcgtggcgattaccgaacatatgtgtgatgttgacgaactggcgcatttcatcgagaaagaaaccggtcgtgaaacccgcgcaactgtgctgggccacatccagcgcggtggttctccggtgccttacgaccgtattctggcttcccgtatgggcgcttacgctatcgatctgctgctggcaggttacggcggtcgttgtgtaggtatccagaacgaacagctggttcaccacgacatcatcgacgctatcgaaaacatgaagcgtccgttcaaaggtgactggctggactgcgcgaaaaaactgtattaatgatttcggaaaaaggcagattcctttaccctgaaaccgatgacagaagcaaaaatgcctgatgcgcttcgcttatcaggcctacatgaattctgcaatttattgaatttgcaaacttttgtaggccggataaggcgttcgcgccgcatccggcatggacaaagcgcactttgtcagcaatatgaggcggatttcttccgcctttttaatccctcaacatatacccgcaagttatagccaatctttttttattctttaatgtttggttaaccttctggcacgctttgctcatcacaacacaacataagagagtcgggcgatgaacaagtggggcgtagggttaacatttttgctggcggcaaccagcgttatggcaaaggatattcagcttcttaacgttagttatgatccaacgcgcgaattgtacgaacagtacaacaaggcattcagcgcccactggaaacagcaaactggtgataacgtggtgattcgtcagagtcacggtggcagtggtaaacaagcgacgagcgtaatcaacggtattgaagctgatgttgtcacgctggctctggcctatgacgtggacgcaattgcggaacgcgggcggattgataaagagtggatcaaacgtctgccggataactccgcaccgtacacttccaccattgttttcctggtacgtaagggaaatccgaagcagatccatgactggaacgatctgattaaaccgggtgttagcgtgatcacgcctaatccgaaaagctctggtggcgcgcgctggaactacctggcagcctggggctacgcgctgcatcacaacaacaacgatcaggcaaaagcacaggattttgttcgggcactgtataaaaacgtcgaagttctggattctggcgcgcgtggctccactaacacttttgtcgagcgcggaattggcgatgtactgattgcctgggaaaacgaagctctgctggcagcgaatgaactggggaaagataaattcgaaatcgtcacgccgagtgagtctatcctcgcagagccaaccgtgagcgtggtcgataaagtggtcgagaaaaaaggtactaaagaggtggcggaagcctacctgaaatatctctacagcccagaaggtcaggaaattgccgcgaaaaactactaccgtccgcgcgacgctgaggtggcgaaaaagtacgaaaatgcgtttccaaagctgaagttattcaccattgatgaagagttcggcggctggacgaaagcgcaaaaagagcattttgctaacggcggtacgttcgatcagatcagcaaacgctgatttccccaggataattatcaaacccggtggtttctcgcgaccgggttttttatttgtcacgattttgcgttacccttgcatctctttgaggtacagggaaaaaaagatgaaaaaagcgggtcttctttttttggtgatgatagttatcgccgttgtggctgccggtattggttactggaaattaaccggtgaagagagcgatacattacgtaagattgtccttgaggaatgtttgcccaatcagcagcaaaatcaaaatcctagcccatgtgcggaagtcaaacccaatgccggatacgtggttttaaaagatcttaatggcccactgcaatatctgttgatgccaacgtatcgtattaacggtactgaaagtcctttgttgaccgatcctagtacgccgaacttcttttggttggcttggcaggcgcgtgattttatgagcaaaaaatacggccagccggttcccgatcgcgcggtttctttggcgatcaactcccgcaccgggcgtacgcaaaaccattttcatattcatatctcttgtattcgtcctgatgtgcgcaaacagctggataacaatctggcgaacatcagcagccgctggttgccactgccaggtggtttgcgcgggcatgaatacctggcgcgtcgggtaacggaaagcgaactggtacaacgcagcccatttatgatgctggcagaagaagtacctgaggcgcgggaacatatgggacgctacgggctggcgatggtacggcagagtgataacagttttgtattgctggcgacacaacgaaatctactgacgcttaaccgtgctagtgccgaggaaattcaggatcatcagtgtgagattttgcgttaaggcgaagagttaaggaaagtaagtgccggatatgaaatccggcacctgtcagacttaagcctgtttagccgcttctgcagctttaacgattactgcgaaggcgtcagctttcagagaagcaccaccaaccagcgcgccgtcgatatccggctgagcaaacagttctgcagcgttagacgcgtttacagagccgccgtactgaatgatcacttgttcagcgatgttagcgtcaactttagcgatgtggtcacggatgaatttgtgaacagcctgtgcctgagccggagttgcagatttgccagtaccgattgcccatacaggttcgtaagcgataaccgcaccttcgaatgccgcagcaccctgagttttcagtaccgcgtcgatctgacgtgcgcaaacttcttcagttttgcccgcttcattttcagcttcggtttcaccgatgcacagaaccggagtcaggccctgctctttcagcaccgcgaattttttcgcgatcagttcgtcagattctttgtggtaagtacgacgttcagagtgaccgatgatgatgtactgtgcgccgatgtctttcagcatagcagcagaggtttcaccggtgaatgcgccggacaggttcaggtccacgttttgcgcacccagcatgatgtggctgccttcagcttcgcgcttcgccatatcgatatacatttccggtggtgcgattgcaaccgcacagccagcaacacctgccagctctttacgcaggttagaaaccagctcgtgaaccatgtggcggctgccgttcagtttccagttacccatcactaaaggatgtcgcattttaattctccacgcttataagcgaataaaggaagatggccgccccgcagggcagcaggtctgtgaaacagtatagagattcatcggcacaaaggctttgctttttgtcatttattcaaaccttcaaggctttcagatagcgccagcttaatcggttcaacagcgaaggtcagccccttttcgccgttgtccgcgacaacataacgcagtgcaccttctgtctcggtgtaataacgtttgtttttccccgccgttagtaggctctgcagttttttctggctttgtgttttggtcattaatggggtgagtgtgcggatcaccgctgccatgtattcctgagctttcgctttcgcggctttttgctctggcccctggatgggtagccaggtcatttgaatgcttttgatttttaaggtaccgcgctccagcgctgtagaagcatacaagttctcattaattttacttgcagcacgagtgagattggctttgtcgggactgctgtcgatggcacgaaattcgttcagtggcaggctgggattctggctgttaaagtcttctcgaaactggctgatggagagatcgaaagtaggggctccagccagcagataaggcgcggtcgttgccgtatctggtgtttgtgcatgcgcctctgttgtaacggttaatgcagaacataagagaaaaaacagcgtacaccctggcttcattgacagtaccttttgttatgactggctccgattaaaacgatatctgtcgcccttgtcaaaagggtagaatcctggaaaagacaaccatcaaggaacttacatgaccatacagcaatggttattcagttttaaagggcgtattggacgccgtgatttctggatttggataggcctgtggttcgcaggcatgctggtgcttttcagtctggcgggtaagaatctactcgatattcagaccgcggcgttttgccttgtgtgcttgctctggccaacagcggcagtaactgttaagcgcttgcatgatcgcgggcgttccggcgcatgggcatttctgatgattgtggcgtggatgctgctggcgggtaactgggcgattttaccgggtgtctggcaatgggcggtggggcgttttgtcccgacgttgattctggtgatgatgcttatcgatcttggtgcgtttgttggcacacaaggcgaaaataaatatggtaaagatactcaggatgtgaagtataaagccgacaataaaagtagtaattaacctttaatatatctcttactgctatttttttccgggattgttatttccacgatgcaaatgacaatacccggaaaatccttctgaactcttcaccttaagcaatatcaaaaaaaatggtaatccataagatcattacttgtttgttcttcccttaacggcgcattattcttaagtcgtaatcgacagagaggcgaatatacagaggtgccctatgaaagatgtcgtagataaatgcagtactaaaggatgtgcgattgatatcggtacggtgattgataacgacaactgtaccagtaagtttagccgcttttttgccacccgcgaagaagcagagtcttttatgaccaaactgaaagagcttgccgccgctacatcctctgcagatgaaggggccagcgtggcctataagattaaggatctggaggggcaagttgagcttgatgcggccttcactttcagttgccaggccgagatgattatttttgagttaagtctgcgtagcttagcttgatggagttgctttagaaggagttaaacatggcttataaacacattggcgtggcaatttccgggaatgaagaagatgccttactggtgaataaagccctggagctcgccagacataatgacgctcacctgacgttaattcatattgatgatggcttaagcgagttgtatccgggtatctacttccctgcaacagaagatattcttcaattgttgaagaataagagcgataacaagctgtataaactgacgaaaaatattcaatggccgaagacaaaactgcgtattgaacgcggagaaatgccggaaacactgctggaaattatgcaaaaagagcagtgcgacctccttgtctgtggtcatcatcacagttttatcaaccgtttgatgccggcatatcgcgggatgatcaataagatgagtgcggatttgctcatcgtgccgtttatcgataagtaaccgcttaccagtaatgctccgctgtcatatggcccggtcggcgacgtaaatgtttcgtcatctgccgggtctctttcagcaactgttgtgtatcgcgcaccatctgtggattgccgcacagcatcacatggctggtttctttattcatcggcaggccaatcgtgctttccagttccccactttcaattaatgccggtatccgtccggtgaggctccccgctgccgtttcccgactgaccaccgtctgaatgcgcagttttccttcgtagcgtttttccagttcctgcatcagtggcaaatagcttaagtcggcggcataacgtgcggcgtgcaccaggaccagatttttgaagcgatctaaatctttacctagttgcagaatgcttaaataagggccaatcgctgtaccggttgccagcatccatagcgtttcgcagtgcggcacttcatcgagcacaaagaatcctgccgcttcgctaaccacctgcacttcatcgcctggtttcagtgccgccagtcgtgggcttaatttgccatcggggacggtgaccaggtaaaactccagatcgggattatcggggctgtttacataggagtaggcgcgctggacgcgttcgccgtcgatttcaaggccaagcttggtaaattgcccggcggtaaacggaagcacgggggcgtgaacggtgagactaaacagggcgtcggtccagttctgcactttagtgactttgcctgttacccaatcagccatgtttttctcctgttttgattgacttgccttatcttcgttctccgaacaaaaaaattccagtcccgaaggactggaaggctcaatcgatcaaatcaatcagaggatgtgcacctgcatttccgggtctttgcgatccagatagtggatggactgaatgcggcgaatggtgcgactcttgccgcggatcagcagcgtttcggtagtcgcgatattgcctttgcggctaatgccttccagcagatcgcctttggtaataccggtggcagagaagatgacgttatcgctgcgcgccatatcgcccaggcgcaatactttaccggcttcgatgcccatcgctttgcagcgtgccagctcctgctcgccaatgcgacgattctcttcgttgtcgcctttgacgtcatgacgcgccagcagacgaccgttcatgtcgccatctaatgcgcggatcaccgccgcagaaactacgccttccggcgcgccaccaataccgtacagcacgtcaacttcgctgtctggcatacaggtgagaatactggccgcaacgtcgccgtccggaatagcaaatacgcgtacgccgagttgctgcatttcagcgataacggcatcgtggcgtggtttagccagaatcgttaccgtcagttcgctcaacggtttgccgagcgccgccgctacattgcgcaggttatccgccagcggcaggttcagatcaatggtgcctttggctcccggcccgacaatcagcttctccatatacatatccggcgcattgaggaagcagcctttatcgcctactgccagcaccgccagcgcgttagcctggcccatcgccgtcatgcgcgtgccttcaatcggatcaacagcaatatctaccgcgtcgccgcgaccagtaccgactttttcaccaatgtagagcatcggtgcttcgtcgatttcaccttcaccaatgacgatggtgccgtcaatgttgacctggttgagcataatacgcatggcgtttaccgccgcgccgtccgcggtgtttttatcgccgcgtcctaaccatttgtagccagccagcgccgcactttcggtgacgcgggaaaattcgatggcaagttctcgtctcatagcaaactctaagcagtaaggaatggcgcgaagtgtagcacaggggaagggagggattattgatgtgtgcggggttgcccccgcacgtttcgggactaccggatgcggcataaacgcttcattcggcatttacattattcgtcgtgttcttcccacgccatcgcgcgtttaaccgcttttttccagcctgcgtaacggtaattacgctcagtggtttcgatgcctggacggaactcgcgctcaatcaccgctttctcttgcagctcgtcgaggttctgccagaagccaaccgccaggcctgcgagataggccgcacccaatgcggtgacttcgcgcacttccgggcgctcaacgcgggtgccgagaatatcggactggaactgcatcaggaaattgtttgctactgcgccaccatccacgcgcagggcgtgcagacggataccagagtcggcctgcatcgcttccagcacgtcacgcgtctgataagcaatagactccagcgtcgcgcgtataatgtggttagcgttcaccccacgagtcagaccgaaaatcgccccgcgcgcatacgggtcccagtacggcgcacccagcccggtaaatgccggaaccacatacacaccattggtgttttgcactttggtggcgaaatattcggaatcgtaggcgtcgttaatcaacttcatttcatcgcgcagccactgaatggatgcgcctgccataaacaccgcaccttccaacgcatagttcacttcgccagtcgggccgcaggcgatggtggtcagcaggccgttttcacttttcaccgctttctcgccagtgttcatcagcataaagcagccagtgccataggtgttcttcgccatcccttctttcacgcacaactgaccaaacagcgcggcctgctggtcaccggcgatcccggagattggaatacgcgtgccgcctttgccgccaatgttagtctgaccgtatacttcggaagaacgacgcacttctggcagcatctcgcgcggaatatccagcacttccagcattttgtcgtcccagtccagggtatggatgttgaacaacatggtacgagaggcgttggtgtaatcggtcacatggacacggccctgagtcattttccagataagccacgtatcaaccgtaccaaacagcaattcaccacgacgtgcacgctcgcgagagccttccacatggtcgaggatccacttcactttggtgccagaaaagtacgggtcaatcaccagaccggtattgctgcggatataatcttctaaaccgtcacgttttaaatgctcgcagatttctgcggtacgacggcactgccagacaatggcgttatagataggcttgccggtttctttttcccagacaatagtggtttcacgctggttcgtaataccgatagctgcaatttgatcggaactgatatcggctttcgccagcacttctaccagcgtggagctttgggtggcccagatttccattgggtcgtgttctacccaacctggttttgggtagatttgctcaaattcgcgctggctcacgctaatgatattggcatcgtgatccattacgaccgcgcgggagctggtggtgccctggtcgagcgcaacgatatattttttttcagtcatgtttaattgtcccgtagtcatattacaggctagctttttgttcactaggagttgtggtttccttttcttccacaacacagatatcgcaaggcaaatggcgaccaatcagtttgcggtaggcaaatgcacctacaatcgcgccaacgatagggccgaaaagcggcaccaggaagtaaggaatgtctctgccgccggtaaaggcgacattgccccagcccgccagccaggcaaagactttcggaccgaagtcacgcgctgggttcatggcaaaacctgtcaatgggcccatagatgcgccaatgaccgcaatcagtagaccaatcagcaagggagccaaagggccgcgtggtacaccgttgccatcgtccgttaacgccaggatcagccccatcagaatagcggtaatcaccatctcaactgcgaaagcctgcacaaaattgatatgaggattagggtaagtagagaaagtgccagccagatcaacactttcaacgctgccgcgaacaatgtgatgagtctgctcgaagtcgaaaaataaattgtagtaaagcccgtaaactaaagccgcagcacagaaagcgccggcaacttgactaacgataaaaggaataactttgcgcttgtcgaaacaggcaaacagccacaatgcaatggtaacagcgggattaagatgcgcgccggaaacccctgcggtcaggtagatggccattgccacccccagtccccaaatgacactgatttcccactgaccaaaagacgcaccagcgacttttagtgctgcaacgcaacccacaccgaagaaaatcaacaacccggtaccgaggaattcagcaatgcactggcctttcaaggtacttgtttgactcataatcggatcctgaagagttaatgtttgttgtatgcgtgaaagtcacggacctccacgatgcttgtaggcatgctgtaaacttatcgttaacgagcaaaaacgagaaatatcgaacttaaaatgtgtgtgcctcgtcataaaatgagcgttatcgcgccatttattccatctgattgtacatgatgcatgtttgttagatcattcgcgcaacaaatttattaacattttcgattgatgtggattatgtcaccaggagaaggatgaaaagtgtggcaaaccgtaatctgcaaggcgtgccgctggacagcgatggcgcggcttcatacaatcggagctaactaaagtgcgctcgtatttattaaggcgtcaccggtaatcgggacgaggatttttatccatcaacgccttgcaattcaggagaggtatgacaatgagtttagaagtgtttgagaaactggaagcaaaagtacagcaggcgattgataccatcactctgttgcagatggaaatcgaagagctgaaagaaaaaaacaacagtctgagccaggaagttcaaaatgcccagcatcagcgcgaagagctggagcgtgagaacaaccatctgaaagaacagcagaacggctggcaggaacgtctgcaggccctgctgggtcgcatggaagaggtctgattacgcttcatcttccgcgtaatttctttactgtgtaggccaacaggtaacgcagaaaaaaggcaccttgcggtgcctttcttatcattcaatatccagcggatcttcactaagaataatcccggtattgtcggcataaagatggtcgccggagaagaaggtgacaccgccaaaattgacgcggacatcgctttcgccaatgccttcgccagcggcaccaaccggaattgccgccatcgcctggatgccgatatccaactcttccaggtcatctacctgacgcaccgcgccgtaaatgaccagaccttcccattcattttgtactgccagacgcgccagttcagcatcgaccagtgcgcgacgaacagaaccaccgccatcgacgacaagaacacgaccacggccattctgttcgagcagatcgtacagcaacccgttgtcctcgaaacattttaccgtgattatttgtccgccaaagctcgcccgtccgccaaagttggagaacagcggttccacgacgttaacatcttcttgatagatgtcacaaagctcggaagtatcgtatttcataggcttaacattcagttgctgcgagaattttcagtatatcgcgctatgtgggctgttggcaaaatcatcaattgttaattgatatttgtcagttatgctgcccactggcttaggaatatccctaaaacaaacagcaggttagtcagtaacgctcccttgacagtacgttccagcattggtcgcatcgccaccgggtccatttcccgcatcacataacgggcttgcttcaccagtaatggtgccgccagcaggaacagccagccccacaggctatgcaggctaaagagattaaacagcgccagacacaccaggctgcccatcagcaggcaggcatgataacgacgcgcgttcacttcacctaagcgcaccaccagcgtgtttttgccattttcgcggtcgctattgatatcacgcaggttattaatattcagtactgccgttgccagcaggccgcatgcggtcgccggaaggatcagtgccggaatcaatgtatgagcctgtaaataccagctccccatgacactcaaccagccaaagaaaaccagtacggaaatatcacccagaccgatataaccataaggacgattgcccacggtgtaggtgatagcggcaatgatgctcaacccgccaagaatcaggaaaccgacaaaatcggccagcgtatggcatgccactgcaaccagtgccagcccggagagacagatgagcacgacggtaataatgagcgcccgtttcatctcttgctgggtaatgacccctttttgcatgccgcgtagcggcccaatgcggtcaggtttatcgctgccttttaccgcatcgccgtaatcattggcgaggttagaaaggatctgtaatagcccggcggtaattagtgccagcagggcgaccagcggatcgaagtgaccttgccaccatgccagcgctgtcccgacgataattgcagcaaaggcgagggggagggttttaggtcgtaaactttccagccacgcctgagttcggctaatttgttgttcagtcataatacgcgccaataaaaatggggcctttcagccccatcaaacaatgatgaaaatgattgaacgcgattataggataaaacggctcagatcttcatctgccaccaacgcatccagatgtttgctcacataatctgcgtcaatagtgatattttgaccgcttaaatcgctggcgtcgtaggaaatctcttccattaaacgctccagaacagtgtgtaaacgacgagcaccgatgttttcggtagattcgttcacctgccatgccgcttccgcgatgcgtttaataccggagtcggtaaactcgatatttacgccttcagtcgccatcagtgctttgtactgcacggtgatagaggcattcggctcggtcagaatacgctcgaagtcgctggtggtcagcgcctgcagttcaacgcggattggcagacgaccttgcagttccgggatcaggtcagacggtttcgcaatctggaacgcgccagaagcgataaacagaatgtggtcagttttgaccatcccgtgtttggtggaaacggtgcaaccttctaccagcggcagcaggtcacgctgaacgccttcacgagaaacatccggaccggaagactcgccgcgcttacagattttgtcgatttcgtcgataaacacgatcccgtgctgctcaacagcgtcgatagcgtcttgcttcagctcttccgggttcaccagtttcgccgcttcttcttcaatcagcagcttcatggcgtctttgattttcagcttacgcgctttttgcttctggccgcccaggttctggaacatggactgcagctggctggtcatctcttccatgcccggaggagccataatttcaacgcccatcggtgctgcggcaagatcgatctcgatttctttgtcatcaagctggccttcacgcagttttttgcggaatgcctgacgagcagcggacggttcctgctgctgttcggtctgtccccagttgtttttagcaggtgggatcagcacgtcgagaatacgttcttctgccagttcttcagcgcgataacggtttttctcgatagcctggacgcgtaccattttcacggcggcatcggtcagatcgcgaataatagaatccacttccttaccgacgtagcccacttcggtgaatttggtcgcttcaactttgatgaacggcgcattcgccagcttagccagacgacgggcgatttcagttttaccgacaccggtcgggccgatcatcaggatatttttcggggtcacttcatggcgcagctcttcgttgagctgcatgcgacgccagcggttacgcagagcaatcgccacagaacgcttggcgttgtcctggccgatgatgtgcttatccagttcgctgacgatttcgcgtggggtcatttcagacatgggagatccttacgctttgtagcttaattcttcgatggtgtggaaatggttggtatagatgcaaatgtcgcctgcaatatccaacgccttttcagcaatttcacgggcgctaagttcagtgttttctaacagcgcgcgcgccgcagcctgggcgtaagggccgccggagccgatagcaataagatcgttttctggctgcaccacgtcaccgttaccggtgatgataaggcttgcagtttcatccgcgactgccagcagtgcttcaagtttgcgcagcatgcgatcggtacgccagtcttttgccagctcaacggcggctttgaccagatggccctgatgcatttccagtttacgttcaaacagttcgaacagcgtaaaagcatccgcagtaccgcccgcaaagcccgcgatgactttgtcgttgtacagacggcggacctttttcacgttgcctttcattacggtattgcccaacgtggcctgaccatcaccagcgatgaccacatggccgttacggcgtacgcttactatagttgtcacgagctgaccccttggttacgaatacagagtacaaaccccgtacaaaagtacggggcataatgcaattatagatgggggggattttgagggtttcaacccccggcggcgagccgaatgcagtttgtatgacccgccatcttcaaccgattgagggtgctgtctgcgttctctttgcctttcaccgggccaatgaccacacgattccagccattgttggtggtgattttgctgtcaaagccttcgaacgccagctgagcacgtaccgtctctgcctgttccgcgcctctgaagctaccgcactgcaccatccagcggcgttcgtcttttttctccgccgtcggttttggcgcgtcagcggcacgagcaactggcgcagcttgctgcggcttgctctgcgcagtcgtgtgcgcaggagtttgcagcagatcctggtacggctgctgagaagaagccggtttagactggcgcggttgcgcctgtaccggtgcggcttggctcgtacgcgtctgctgctgccagctttgttcagtcgtacggctctgctgagccaggcgttgctgttccgctaattgctgcgcctgacgttggcgctgtagcgtttgctgacgctgttccggcgtctgttcattccacggaacttcaaccagctgcgttggctgctggcgcatatcagcctgcatttgttcaagaagctgacgttgttctggtgtcagttgctccggcgttttcacttcaccaccggcagaaggttctgtgggcgcacgcactcccggctggcgactttccagctctttaatgtagcgccagcgttcttctggttttggtggtagtccgtttccggtcactttctggctttgcagcgtctcggactcttctttcttgtgatgcgtaatgaagtacagaccaccgataaaggtcacaagaacggcggcagcaatagcgaccatagcgggagaaaccgcaggcagatttcgttgctttttccgactggtgctcttttttcgccggctaggtgccggttggctgcggcgtacataatctcgttgtgccactatcgtttcgctgtatttattcgttcgtcagcccgccatgttacttaagcggcgggcctttgaccagtcacggcagtcttaaaggtttactttaaggtaacgcgcgtgtacttccccggatgataagttcgcagtccattaaacgagagccactgccaacgtgttgcccctgcatttgatcaagcaataacagcatagcttcccgaccgatttcgtaacgcggctgcgcgatggttgtcagcggcggatcacaaaattgcgtcaggtcgatgttatcaaaaccgattatggaaaggtcttccgggactttcagcccctggcgttttgcctgagaaagtgcgccgagcgccatcacatcgctatggcagaagacagcagtaggcggttgtggaagatcaagcagctgctgcatcgctttgcttccggcttcgaaggtgaagtcgccacgggcgatgtattgcggatcaaccataatgccgcagcgacgcagcgcctgaacatagccttgcaggcggtagtgacacagcggcatctcttcgggaccggctatacagccaatccgtttatgcccttgctcatataaataatttactgcatcaaatgcggcggtcagattgtcgatatgaactgtaggcagctccagctccggtgcaaattcgttcgccatcaccatcggcggcagattacgctgttcctcaatgctggcatcaaacggcagcctactacccagcaacaacatgccatcaatttgcttggtgatgatcaaatcgataaaggttttttcctgctgattttgatgcgcacagtcgccaatcagcaccagatatccgtgatttgccgccgtaacttcgataccgcgaataatttcgctaaagaagggatcgcagatatccgggacaatcaccagaatggtgcgggattcattacgcttgacgttgcgccccataggctgcggtaaataacccacttcccgggccgctttttcaacccgattacgggtggcctgggagactttatcgggattcattaatgctcgggagacggtcgctgtagagacttttgccttgagggcaacgtctttcatggtcgcggcagtttcctgcttcttcgctttcacactcactcctcgcctggcacgtcaggcgtactacatccatgtttacttcacatcggcaacatttttagcagatagcgcgtgaaaacggttacagaattttcatgaaaagtgtgatgaatattgaatttttcgatccgcctcgcatcgtgagcggtttaaccctcaatcggatcaacatccagcacccatttcaccttacgggaatccggtattgtattgatgagcgccagcgtaccgttaatgatgtgttgcaagcgcacgcgggaagggtgctgcaacaatatctgccagcgccagcgaccgccacgtttaggtgccagagccggaaccggaccgagaacccacagtttctcgtctgccagtgggctggagaggatcagattacgcagttgttgcaggaacaatggcgcgtgctgattgttatgatcttccgcacgcacaatcacatggctggtccacggcggtagctgcatcattcgccgctcagccagcgcctgttcggcaaaggcgtcgtagcctttatagagcaacgtttgcaacagaggatgttccggatggtgcgtttgcagcaccacttcgccctgtttacccgcacgcccggcacgaccggcgacctgggtgtaaagctgagcgaaacgctctgcgctgcgaaaatcggcagaaaacagcgcgccgtccacgtccagtaatgcaaccagcgtcacatccgggaaatggtgacctttcgccagcatttgtgtaccaatcaaaatccgcgcgccgccgcgatgtacttctgccagttgctgttccagcgcccctttgcggctggtggtatcgcggtcgatacgagaaatgggcacgccggggaacaacggcgcgagcgtctgttcaagctgttcggtgcccagccccacggggaccaggtgcgtggaaccgcaggaagggcactggcgcggcaccggacgctgactgtcacagtggtggcagcgcagatggtgctgcgcctgatgcagcgtgtagtagtgatcgcaacgtgggcattcggcaatccagccacagtcgtggcacagcagtgcaggcgcaaagccacggcggttaagaaagagaatgacctggttatcagcctgtaaatgctggcgcatacgagtgattaacgccggagccagacctgcctgcaccttctgaccttttaaatccagcacatgttgaattgccggacgcgcattccctgcccgacgggtcaggcgcagcaggcggtattttttctgctggacgttgcataacgtttccagcgcgggcgttgcggagccaagaataatcgggatttgctcgctgtgcgcacgatacaccgccaggtcgcgggcatgatagcgccagccttcctgctgcttgtaggagctgtcgtgctcttcatcaatgacaatcacgccgagatttttaaacggcgtaaacagcgcggagcgggtgccgatcacaatcgccgcctcaccatttttcgctttcagccacgcgctaagacgctcgctgtcgttcaggccggaatgcagaacttccacgggggcattaaaacgttcacgaaaacgggcgatagtttgcggtgtcaggccgatttccggcaccatcaccagcgcctgtttgccctgagcgagcacgttttccagtacgctgagataaacctccgttttaccggaaccggtaacgcccgccagcagccaggcagaaaaagtatctgccgcgctatgaattgcgccaacggcggtggcctgttcggtattcaatcgcaaccgctcaccagaaacggcatagttcgttcgccagtcgctaaactctggtgtttcacttgctaaatcacacagaccttttttgcgtagcgcctgcaacgcggcatcattaaattcgagcgtggcgacctggtcgcgccagattttgccttgccgtaacgccgccagcgcctgttgttgcttgggggagcgtttcaggctgttcagatccaccgcctggccttgttcagtggcaaaccagtaccacatcggcgcgttcgccgcaggccgcccctggcgtagtaaaatcggcaaggcatgaaacagcacatcgccaatcggatgatgatagtaatctgccgcccatagcagcaatcgccagacggagtgagtaaacaccggctcactatccagcacttcgactaccgcttttagctcattgagcggcagttcgctggcatcgctaacacttaccacaatcccgatgcgctcctgctgtttgccaaacggcacgcgcacgcgacacccagctttaaccgtcatgccttctggcagcagatagtcaaaggtacgaggaagcggaacgggcaaggcaacgtgggcaacgggcatagcatcatcctgacttgaaattcggtgggttagtatacacattgccgtagaagagtgcggatcagtttgcatacgctggttaatttctgtatgatttcgcgccttcgtacgaaatgatcgtattgaagctatacttttaacatcgcgtggtgtctggcgttagggctggaagagcgacgcggccttaaaccgaggttttcccatgaaaaaagatattcacccgaaatacgaagaaattactgctagctgctcttgcggtaacgtaatgaaaatccgctccaccgttggtcatgacctgaacctcgacgtgtgcagcaagtgccacccgttcttcactggcaaacagcgtgatgttgctaccggtggccgtgttgaccgcttcaacaagcgtttcaacatcccgggcagcaaataagaccggatttccgaaaaaagcgccgcacggcgctttttttgtgcctgaattttggtcgtattaccagctaaacagcggccattctttggcgaccgtggtgagttgtggcgcatcgaaaacggcttgtgggctgaccaccgtttcctcaagcggaatattcttgccgtaacgttctttgagctttgcctgaacttgtgggctgctcaggtcgaactctttcaacttctgctgctcgcccacgcgcattcccagcgcgttctggtaaaccttccacaccacttcgctacagtactggcgatcgtcgctccaactgaagctgaaatcatacggtttaccgagataacgttttgccgtttgcgccagtttttgctgttgttcaacactcagtccgccttcaacgcggcgaacaacgtatttgcccttttcaccatgggcgatccactgcttgagcggggtgtatttcaccgggccgactgcttcaaaaacgtagggctttttgttgcgtatcaccagcataccggtgtggctataatcggtatgggtcgccagttggatcgctttactttggctactgcgagagatctgaaagatgatgtcgccggtttgtggctgccaggcaaaggcaggtacagaaaccagcaggctgaggatcagcagcctgtttttcatagttaaacgtccatgtataaaaagcggtgggtcgcagacaacgtgctcgttgtttatgccggatgcggcgtgaacgccttatccggcctacaagttcgtgcaaattcaataaattgcaatatgacgtaggcctgataagcgtagcgcatcaggcgattccactccgcgccgctcttttttgctttagtattcccacgtctccgggttaatccccatctcacgcatgatctcttttgccgcttccgggatttcgtcgctgcgctctttacgcagatcggcatcatccggcaaaggttgcccggtaaaggcatgcagaaacgcttcgcacagcagctcgctgttggtagcgtgacgcaggttgttcacctgacgacgcgtgcgttcatcggtgaggatttttaacaccttaagaggaatggaaaccgtaatctttttgacttgttcactcttcttgccgtgctcagcgtatgggctgatatattcgccgctccattcagccatgagatacttaatcctcttcgtcaataaattgagaccagaccacacagttgatgtgggtactgaccgtaaacccgcatagtttaccgtacaggcgttaccgtgacatcgtgtaatgcacctgtcggcgtgataatgcatataattttaacggctatttgggatttgctcaatctatacgcaaagaagtttagatgtccagatgtattgacgtccattaacacaatgtttactctggtgcctgacatttcaccgacaaagcccagggaacttcatcacatgacgcgtaaacaggccaccatcgcagtgcgtagcgggttaaatgacgacgaacagtatggttgcgttgtcccaccgatccatctttccagcacctataactttaccggatttaatgaaccgcgcgcgcatgattacagccgtcgcggcaacccaacgcgcgatgtggttcagcgtgcgctggcagaactggaaggtggtgctggtgcagtacttactaataccggcatgtccgcgattcacctggtaacgaccgtctttttgaaacctggcgatctgctggttgcgccgcacgactgctacggcggtagctatcgcctgttcgacagtctggcgaaacgcggttgctatcgcgtgttgtttgttgatcaaggcgatgaacaggcattacgggcagcgctggcagaaaaacccaaactggtactggtagaaagcccaagtaatccattgttacgcgtcgtggatattgcgaaaatctgccatctggcaagggaagtcggggcggtgagcgtggtggataacaccttcttaagcccggcattacaaaatccgctggcattaggtgccgatctggtgttgcatagttgcacgaaatatctgaacggtcacagtgacgtagtggccggcgtggtgattgctaaagacccggacgttgtcactgaactggcctggtgggcaaacaatattggcgtgacgggcggcgcgtttgacagctatctgctgctacgtgggttgcgaacgctggtgccgcgtatggagctggcgcagcgcaacgcgcaggcgattgtgaaatacctgcaaacccagccgttggtgaaaaaactgtatcacccgagcttgccggaaaatcaggggcatgaaattgccgcgcgccagcaaaaaggctttggcgcaatgttgagttttgaactggatggcgatgagcagacgctgcgtcgtttcctgggcgggctgagcttgtttacgctggcggaaagtttagggggagtggaaagtttaatctctcacgccgcaaccatgacacatgcaggcatggcaccagaagcgcgtgctgccgccgggatctccgagacgctgctgcgtatctccaccggtattgaagatggcgaagatttaattgccgacctggaaaatggcttccgggctgcaaacaaggggtaaaaatgagtgtgattgcgcaggcaggggcgaaaggtcgtcagctgcataaatttggtggcagtagtctggctgatgtgaagtgttatttgcgtgtcgcgggcattatggcggagtactctcagcctgacgatatgatggtggtttccgccgccggtagcaccactaaccagttgattaactggttgaaactaagccagaccgatcgtctctctgcgcatcaggttcaacaaacgctgcgtcgctatcagtgcgatctgattagcggtctgctacccgctgaagaagccgatagcctcattagcgcttttgtcagcgaccttgagcgcctggcggcgctgctcgacagcggtattaacgacgcagtgtatgcggaagtggtgggccacggggaagtatggagcgcacgtctgatgtctgcggtacttaatcaacaagggctgccagcggcctggcttgatgcccgcgagtttttacgcgctgaacgcgccgcacaaccgcaggttgatgaagggctttcttacccgttgctgcaacagctgctggtgcaacatccgggcaaacgtctggtggtgaccggatttatcagccgcaacaacgccggtgaaacggtgctgctggggcgtaacggttccgactattccgcgacacaaatcggtgcgctggcgggtgtttctcgcgtaaccatctggagcgacgtcgccggggtatacagtgccgacccgcgtaaagtgaaagatgcctgcctgctgccgttgctgcgtctggatgaggccagcgaactggcgcgcctggcggctcccgttcttcacgcccgtactttacagccggtttctggcagcgaaatcgacctgcaactgcgctgtagctacacgccggatcaaggttccacgcgcattgaacgcgtgctggcctccggtactggtgcgcgtattgtcaccagccacgatgatgtctgtttgattgagtttcaggtgcccgccagtcaggatttcaaactggcgcataaagagatcgaccaaatcctgaaacgcgcgcaggtacgcccgctggcggttggcgtacataacgatcgccagttgctgcaattttgctacaccagtgaagtggccgacagtgcgctgaaaatcctcgacgaagcgggattacctggcgaactgcgcctgcgtcaggggctggcgctggtggcgatggtcggtgcaggcgtcacccgtaacccgctgcattgccaccgcttctggcagcaactgaaaggccagccggtcgaatttacctggcagtccgatgacggcatcagcctggtggcagtactgcgcaccggcccgaccgaaagcctgattcaggggctgcatcagtccgtcttccgcgcagaaaaacgcatcggcctggtattgttcggtaagggcaatatcggttcccgttggctggaactgttcgcccgtgagcagagcacgcttagcgcacgtaccggctttgagtttgtgctggcaggtgtggtggacagccgccgcagcctgttgagctatgacgggctggacgccagccgcgcgttagccttcttcaacgatgaagcggttgagcaggatgaagagagcttgttcctgtggatgcgcgcccatccgtatgatgatttagtggtgctggacgttaccgccagccagcagcttgctgatcagtatcttgatttcgccagccacggtttccacgttatcagcgccaacaaactggcgggagccagcgacagcaataaatatcgccagatccacgacgccttcgaaaaaaccgggcgtcactggctgtacaatgccaccgtcggtgcgggcttgccgatcaaccacaccgtgcgcgatctgatcgacagcggcgatactattttgagcatcagcgggatcttctccggcacgctctcctggctgttcctgcaattcgacggtagcgtgccgtttaccgagctggtggatcaggcgtggcagcagggcttaaccgaacctgacccgcgtgacgatctctctggcaaagacgtgatgcgcaagctggtgattctggcgcgtgaagcaggttacaacatcgaaccggatcaggtacgtgtggaaagcctggtgcctgctcattgcgaaggcggcagcatcgaccatttctttgaaaatggcgatgaactgaacgagcagatggtgcaacggctggaagcggcccgcgaaatggggctggtgctgcgctacgtggcgcgtttcgatgccaacggtaaagcgcgtgtaggcgtggaagcggtgcgtgaagatcatccgttggcaagtctgctgccgtgcgataacgtctttgccatcgaaagccgctggtatcgcgataaccctctggtgatccgcggacctggcgctgggcgcgacgtcaccgccggggcgattcagagcgatatcaaccggctggcacagttgttgtaatttcagaaatttaataatgcccggtactcatgttttcgggtttatggtttctaatgaaatatattgaattatcataggattaggccggattaagcgtttacgacgaatccggcaagaagcaataagtacatggttagtttatatttgcagtccggtttgctttgcataccggattttctttttcttaccatcctgaagttttttcatcttccctgatttttcctcaccatcattggtcatttttcggttgacgcccttcggcttttccttcatctttacatctggacgtctaaacggatagatgtgcacaacacaacatataactacaagcgattgatgaggtaaggtatgagcttttttcacgccagccagcgggatgccctgaatcagagcctggcagaagtccaggggcagattaacgttagcttcgagtttttcccgccgcgtaccagtgaaatggagcagaccctgtggaactccatcgatcgccttagcagcctgaaaccgaagtttgtaagcgtgacctatggcgcgaactccggcgagcgcgaccgtacgcacagcattattaaaggcattaaagatcgcactggtctggaagcggcaccgcatcttacttgcattgatgcgacgcccgacgagctgcgcaccattgcacgcgactactggaataacggtattcgtcatatcgtggcgctgcgtggcgatctgccgccgggaagtggtaagccagaaatgtatgcttctgacctggtgacgctgttaaaagaagtggcagatttcgatatctccgtggcggcgtatccggaagttcacccggaagcaaaaagcgctcaggcggatttgcttaatctgaaacgcaaagtggatgccggagccaaccgcgcgattactcagttcttcttcgatgtcgaaagctacctgcgttttcgtgaccgctgtgtaagcgcgggcattgatgtggaaattattccgggaattttgccggtatctaactttaaacaggcgaagaaatttgccgatatgaccaacgtgcgtattccggcgtggatggcgcaaatgttcgacggtctggatgatgatgccgaaacccgcaaactggttggcgcgaatattgccatggatatggtgaagattttaagccgtgaaggagtgaaagatttccacttctatacgcttaaccgtgctgaaatgagttacgcgatttgccatacgctgggggttcgacctggtttataaatagtgtggcttttgtgaaaatcacacagtgatcacaaattttaaacagagcacaaaatgctgcctcgaaatgagggcgggaaaataaggttatcagccttgttttctccctcattacttgaaggatatgaagctaaaacccttttttataaagcatttgtccgaattcggacataatcaaaaaagcttaattaagatcaatttgatctacatctctttaaccaacaatatgtaagatctcaactatcgcatccgtggattaattcaattataacttctctctaacgctgtgtatcgtaacggtaacactgtagaggggagcacattgatgagcacgagtgacgatatccataacaccacagccactggcaaatgcccgttccatcagggcggtcacgaccagagtgcgggggcgggcacaaccactcgcgactggtggccaaatcaacttcgtgttgacctgttaaaccaacattctaatcgttctaacccactgggtgaggactttgactaccgcaaagaattcagcaaattagattactacggcctgaaaaaagatctgaaagccctgttgacagaatctcaaccgtggtggccagccgactggggcagttacgccggtctgtttattcgtatggcctggcacggcgcggggacttaccgtagtatcgatggacgcggtggcgcgggtcgtggtcagcaacgttttgcaccgctgaactcctggccggataacgtaagcctcgataaagcgcgtcgcctgttgtggccaatcaaacagaaatatggtcagaaaatctcctgggccgacctgtttatcctcgcgggtaacgtggcgctagaaaactccggcttccgtaccttcggttttggtgccggtcgtgaagacgtctgggaaccggatctggatgttaactggggtgatgaaaaagcctggctgactcaccgtcatccggaagcgctggcgaaagcaccgctgggtgcaaccgagatgggtctgatttacgttaacccggaaggcccggatcacagcggcgaaccgctttctgcggcagcagctatccgcgcgaccttcggcaacatgggcatgaacgacgaagaaaccgtggcgctgattgcgggtggtcatacgctgggtaaaacccacggtgccggtccgacaagtaatgtaggtcctgatccagaagctgcaccgattgaagaacaaggtttaggttgggcgagcacttacggcagcggcgttggcgcagatgccattacctctggtctggaagtagtctggacccagacgccgacccagtggagcaactatttcttcgagaacctgttcaagtatgagtgggtacagacccgcagcccggctggcgcaatccagttcgaagcggtagacgcaccggaaattatcccggatccgtttgatccgagcaagaaacgtaaaccgacaatgctggtgaccgacctgacgctgcgttttgatcctgagttcgagaagatctctcgtcgtttcctcaacgatccgcaggcgttcaacgaagcctttgcccgtgcctggttcaaactgacgcacagggatatggggccgaaatctcgctacatcgggccggaagtgccgaaagaagatctgatctggcaagatccgctgccgcagccgatctacaacccgaccgagcaggacattatcgatctgaaattcgcgattgcggattctggtctgtctgttagtgagctggtaagcgtggcctgggcatctgcttctaccttccgtggtggcgacaaacgcggtggtgccaacggtgcgcgtctggcattaatgccgcagcgcgactgggatgtgaacgccgcagccgttcgtgctctgcctgttctggagaaaatccagaaagagtctggtaaagccagcctggcggatatcatagtgctggctggtgtggttggtgttgagaaagccgcaagcgccgcaggtttgagcattcatgtaccgtttgcgccgggtcgcgttgatgcgcgtcaggatcagactgacattgagatgtttgagctgctggagccaattgctgacggtttccgtaactatcgcgctcgtctggacgtttccaccaccgagagtctgctgatcgacaaagcacagcaactgacgctgaccgcgccggaaatgactgcgctggtgggcggcatgcgtgtactgggtgccaacttcgatggcagcaaaaacggcgtcttcactgaccgcgttggcgtattgagcaatgacttcttcgtgaacttgctggatatgcgttacgagtggaaagcgaccgacgaaagcaaagagctgttcgaaggccgtgaccgtgaaaccggcgaagtgaaatttacggccagccgtgcggatctggtgtttggttctaactccgtcctgcgtgcggtggcggaagtttacgccagtagcgatgcccacgagaagtttgttaaagacttcgtggcggcatgggtgaaagtgatgaacctcgaccgtttcgacctgctgtaatctgaccccgttcagcggctgcttgctggcagtcgctgaacgttctttaccagcgtatagtgggcgaacgaaaactacacactggatctctcatgtctgccgcaggaaagagcaacccactggcaatcagtggcctggttgtgctcacacttatctggagttatagctggattttcatgaagcaagtcaccagttacatcggtgccttcgactttaccgccttacgctgcattttcggcgctctcgttttattcatcgtccttttattacgtggtcgcggaatgcgcccgacaccgtttaaatacaccttagccattgccctgttacaaacctgcgggatggttggtctggcgcagtgggcgttggtcagcggaggtgcggggaaggtggcgatcctgagctataccatgccgttctgggtggtgattttcgccgcgttgtttctcggtgaacgcctgcgacgtgggcaatatttcgcgattctgattgccgctttcggcttatttttggtgttgcagccgtggcaactcgatttctctagcatgaaaagtgccatgctggcaatcctctccggcgtcagttggggggcgagcgcgattgttgctaaacgtctgtatgcccgtcatccgcgcgtggatttattgagcttaacatcctggcagatgctgtatgcggcgctggtgatgagtgtggtcgctttactggtgccgcaacgtgaaattgactggcagcccaccgtgttctgggcgctggcctacagtgcgattctggcgacggcactggcgtggagcttatggttgtttgtattgaaaaacttgcctgccagtattgccagcttaagcacactggccgttcccgtttgcggcgtactcttttcctggtggctgctcggcgagaatccgggggccgttgaaggtagcggtattgtgctgattgtgctggcactggcgctggtgagccgtaagaaaaaagaagccgtcagtgtaaaaaggatctgaattttttcttcatgtggggcgatctcttatttaacaaaataacgataatgccccaccatccgccagttaaacagcacatcttcttcctgcgcgcctgcgccaatgttatgtatcaccagcggcgtaccgtcgcgggcgaagccatcactaaccaccccaatatgtgccagcccgttatccagtcgccaggagacaatatcgcccgcttgatagtcactggggttcttgctggtggggcgtgttttatcatggcggctaaaccaggtttccagattaggcacccgacggtgatcgatgttgctgtccgggcgctttaacttccatttttgcgggtactcagcaaaattcttcgccatatcttcgtgaaccagtttctgcaaatcgaccttctggctgcgcaatgcgcggatcaccacatcggaacatacaccgcgttcttgcggaacatcaccgccaggataagtaagctgcacatacgccggatcgtaaaatagcgtgctgccaatttgctgtctggcaccgtctgcgatggcaaggttggtattggcctggatttgtaccacggttggtggaacggcgggagattttaaggagtggctggtaaatgccgttagcaggctgagcagcgccagactagctttcatctggttcgtccgtgaaaataagagtcacagattcgaccttccgggctaacgattgttctgtagagaaaatgtccagaagcggataaaaaattcctgaacaacgtgggagtttcagattactggcacagagtgccggatgcggagtgaacgccttatccggcctacaaaagcacgcaaattcaatatattgcagagattgcgtaggcctgataagcgtagcgcatcaggcaattttgcgttcaaactcccggacaagccgggagtttggagtaggttattcccactcttgcaggaaacgctgaccgtactggtcggctaccagcagagcggcgtaaacctgatctggcgtcgcgccgccaggcatgttgtgaatggtttcaccttctgcacatgccgcttctgccacaattcgcattttcgccgggacatcttctttaatatccagttgagcgagagttattggcaaacctaccgcatggctaagggcagctacggtttcgatttcctccaccggcgcattttccagaaccagctgcgtcagcgtaccgaatgccactttttcaccgtgataatagtgatgcgcgtccgggatagcggtcaggccgttatgcactgcgtgcgccgcagccagaccaccactttcaaaaccaacaccgctcaaataggtgttcgcttcaatcacgcgctccagcgccggagtcactacatgctgttcggcagcaagcatcgctttttcgccttcttccagcagggtgttgtagcacagttcagccagtgccagcgcagcctgggtgcacttgccgcccgccatggtggtcgcgccgctacgagagcaggcacgcgcttcaaaccaggttgccagcgcatcgccgatacccgccgctaacagacgtgcaggtgcgccagcgacgattttggtgtcgacaatgaccatattcgggttatttggcaacagcagatagcggtcaaactcaccctcatcggtgtagataacagacaatgcgctgcacggtgcatcggtagaggcgatagtcggtgcgatcgctaccggaacacccatgaaatgtgccagtgctttggcagtatcgagggtttttccgccaccgataccgagaattgcgccacactgcgcagtctccgcgatgccacgcagacggtcgatctcattttggctacattcaccgccaaacggcgcaatttctactaccagtccagcatctttaaagcttttctcgacagtggattgagcaaaacctaaaacaaatttgtcacccaccactaaccagcgttctgccagcggcttcaggtattcgcccagacgattaatcacatcagcgccctggatgtatttacccggactttgaataatgcggtccataattgctcctttagagatgagtagtgccaaatgcggcattccagtcgtgttcgaacttctctatagcactctctaccgcaggggtgttgagcatttgttgcgctacatctaagggcagggtgatggattcacatcctgccagtaaacagtccagcgcctgacgcggcgttttaaagctggctgccagcaccatgctttctggcgcgtgcatttctaacagcgtttgcagctcctgaaccgtacgaatgccgtctccgccctgggcatctacgcggttaacatacggagcaacgtattttgcccctgccagtgcggctaataacccttgtgcggcgctatatacagcagtgccaagtgtagtaataccctcttttttcagtattttaattgctgccagaccttcggaagtcaccgggattttcaccacaatacccggaatagcgtcgcgcaggcgcttcgcttcttccaccatcccctgcgcgtcgcggctcatggtctgagcaaacagaatgccctcatcaccaatcgctttttgcagacgcggcagcacttcccatatggactccttgctggcagcgataatgctcgggttagttgtcaccccggcaatggggaatatgcgtgccagacgttcgacttctgcgacgttagcggtgtccagatacagttccatgatgtttccttttacagttccagttcatgttgcagcaggctggcgatagcgtcggcagaggcggcgttaaccagcgcgttacggaattcttcgtgcatgatgcggcgagcgaggcggctgaaaatgcgcatatgctgatcgcccgcagcgtgtttgttcagggttaacataatgatgaattgcgcttcatcatcgccccagcgcaccggcgcttgcagacgcgccacgctgatggtggattgctcaatgtgttcacttttgctgtgtggaatggcaaaactaaagcccagaccggtagagaaaacggcctcgcgcgcccacaagtcggcttccagtttacgcggatagcggcagcggcccgccagcagcaggttatcggtcatgcctttgagcacttcttctttgctgcgccagtcgctttccagtgtgatgcactcggcggtgaccagcggtgcgtcttgttgggtcatgcggaattgcgccagcaggtgttctacttccaggctagtacggcaggccattgcctggttgagcaacttgcggcactcacggctatcaagttgcgccatccgagctttcgccgccggaatacttggtgcgctcatgctgagttcatccagccctaagccgaccagcaacggcagcacggaacctttcgctcccagctcaccgcacagaccaatccatttgccctggcgatgcaccgcttgcacggcgtaatcgagcgcccgcaagaatgccggattcaggctgttgtagtgacgagtaaccttagcgttatcgcgatccaccgccagcagatactgcgtcaggtcattactaccaatactaaagaaatcaatctcttcgcagcattgatcgatgatgaacatcacgctcggcacttccagcatgatgccgagctggattttctcatcaaacggaatgtgttcgttacgtagttgctgtttggcttccgccagtttttctttcacccataagatctcttccatactggagatcatcgggatcatgattttcaggctgccgtgagcggaggcgcggaggatgctccgtagctgcgtggtaaacaagctcgcgtactcttcataaatacgcacggcgcgataaccgaggaacgggtttgcctctgcgggaatgttcagataatcaacgggtttgtcgccgccaatgtccatagtgcgcacaataatgctgcgtccgttggcggattccagcgcctgacaaaaaatgttgtacaactcgctttcgcccggtgcgctggtgcgatccatatagagcatttcagtgcggaacaaaccaacgccttccgcaccattgccgaatgcggcctgcgcttccacggagtgagcgatgttagcggcaatttcaatgcggataccgtcagcggtacgggcttgttgggtcagccagacacgctgttgctcacgcagggcgtcctgtacgcgggcttcttgctgataataacgagctacggcttcccctggctcaaccacaatcgccccggcgttgccgtcgatataaatcgtttgttgctgccacggagtaagggcatcaatatccacaccaaccagcgttggaatgttgaagctacgggcaaggatcaccgtatgactggtggtgccgccgcttttgagcaacaatcctttgaggtgatttttatccagttcgaggaactggctgggggtcagttcatcagccatacaaatggcgggctgcgtcagtttgcccggtgccgggaagcgttgctcaccgtagatttgctggagtaactggaagcagacgtcgcgtacgtccagggcacgttcttgcaggtagctgctgctggaacgggaaaactcttcgcaaaagtgattcgcgctggcaacaattgcttcggcgcagcttaatccggcgctgacgcctgccagtaaatgttcgcgcagggaagtatcgccagccagggatcggtgagcttccagaatcgcgctggtagcaccgtcgctatccagcagacgaaactcaatgtttttcagtaccagcgtcaggccgttttccagtgcggattgctcggcgtcaacgcctttggctgcgggaagattacccagcgcattgagatctaaagaagagatcggcgtcagaatgccgcctgcactaccgctgcacacggtgcgggcgcggataatttgcggattcagattggtcagactaaccggcagtggttccagttcgtcagatttaacttccgccagcggcgcatcgcagtgggggaattcatcgcgcagccattggcttaaacgctggtgcgcttcctgttcgtcggccccggaaatcagtaactggcagttatcgcccgccagcgtatcggtgccaatcagcgcaagggcgcttttggcgttgcccttgcggtcagtgcgcaggttatgccactcaatttgactactaaaagtattacacagcgtttcaacgtggcttgccggacgcgcatgtacgccgttaggtagctcacaaataaattccacaatcagggccattgcctctctcccggtacggttttctgtttacaggataagagcgcacggcaacggcctgccatgtgacaaatctgccaaaagctggacaaatgtaatgtaaccgtcaatttgcgacgcgtctcacaagacgctgttttgcggcatgcttccggtttatcgcaagttatgaggcggatcgcatttttgtactgatattacaaaagtccagtaaatggcctttttatccactgtttgctccgcctgcgattgcctattgtttcctccatcaaaaatatggacatgggctttcgcaagcccgggagcagcttatgaatgagttggtgcagatcctgaaaaatacccgtcagcatttaatgacgggcgttagtcacatgattcccttcgtggtaagcggcggtattttgctggcggtttccgtcatgttgtatggcaaaggcgcagtgccggatgccgtagccgatccaaatctgaaaaaactgtttgatatcggcgttgcgggcttgacgctgatggtgcctttcctcgcagcgtacatcggttattccattgcagagcgttctgcgctggctccgtgcgctatcggtgcctgggttggtaacagctttggtgcgggcttctttggtgcactgatcgccgggattatcggcggcatcgtggtgcattacctgaagaaaattccggtgcataaagttctgcgcagcgtgatgcctatcttcattattcctatcgtcggcacactgattaccgcaggcatcatgatgtggggcttgggcgagcctgtaggggcgttgaccaacagcctgactcagtggcttcaggggatgcagcagggcagcattgttatgctggcggtgatcatgggtctgatgctggcgttcgatatgggcggtccggttaacaaagtggcctatgccttcatgctgatttgcgttgctcagggtgtttataccgtggtggccatcgctgccgtgggtatttgtatcccgccgctggggatggggctggcgacgctgattggtcgtaaaaatttctccgcagaagagcgcgaaaccggcaaagcggcactggtgatgggctgtgttggcgttactgaaggggcgattcctttcgccgctgccgatccgctgcgtgtcattccttccatcatggtcggtagtgtttgtggtgcagtaactgcggcgctggtcggtgcgcagtgctatgcaggctggggtggtctgattgtgctgccggtggttgaaggcaagctgggttatatcgcagcagtggctgtcggagcagtggtgacggctgtttgtgtgaacgtgctgaaaagtctggcgcgtaaaaatgggtctagcactgatgaaaaagaagacgacctggatttggattttgaaattaattaattgaggaacgagccatgacgaaaattattgcagtaaccgcatgtcctagtggtgttgcccatacctatatggcagcagaggcgctggaaagtgccgcgaaagcgaaaggctgggaagtgaaagtagaaacccaggggagtattggtctggaaaatgaactgactgcggaagatgtggcgagcgctgatatggtgattctgaccaaagatatcggcatcaagtttgaagagcgttttgctggcaagaccatcgtgcgcgtcaacatcagcgatgcagtaaaacgtgctgacgccattatgagcaaaattgaagctcacctggcgcaaaccgcttaagttcttctcccgctcgcaagggcgggttcgctttcccacaggagttcctcatgacgaatcgtatctctcgcctcaaaactgcactgtttgccaatacccgtgaaatcagcctggagcgggcgctgctttataccgccagccatcggcaaaccgaaggcgaaccggtgatattgcgccgggcgaaagcaacagcgtatatccttgaacatgttgaaattagcattcgtgatgaagaactgattgccggtaaccgcaccgtaaaaccgcgcgccgggattatgagcccggaaatggacccttactggctgctgaaagagctggatcaattcccgacgcgtccgcaggaccgctttgctatcagcgaagaagataaacgtatctaccgtgaagagttgttcccgtactgggaaaaacgtagcatgaaagatttcatcaacgggcagatgacagatgaagtaaaagccgcgaccaacacgcagattttcagcatcaaccagacggataaaggccaggggcacattattattgattacccacgcctgttgaatcacgggctgggtgagctggtggcacagatgcagcaacattgtcagcaacagccggagaatcacttttatcaggccgcgttgttactgctggaagccagccagaaacacattttgcgttacgccgaactggcggaaacgatggcggcaaactgcacagatgcccagcgtcgcgaagagctgctgactattgcagagatctcccgccataacgcgcaacataagccgcagacgttctggcaggcgtgccagttattctggtacatgaacatcattctgcaatacgaatccaacgccagtagcctaagcttggggcgcttcgaccagtatatgttgccgttctatcagacaagtttaacccagggcgaagatgcggcgttcctgaaagaactgctcgaatctttatgggtgaaatgcaacgacatcgtgctgttgcgctccaccagtagcgcgcgttatttcgccggtttcccgaccggctataccgcactgctcggcgggttaaccgagaacggacgtagcgcggtgaacgtgcttagcttcctttgccttgacgcctatcaaagcgtgcaattaccgcaaccgaacctcggcgtgcgcactaacgccttgatcgacacgccgttcctgatgaaaaccgccgaaaccattcgcttcggtaccggtattccgcaaatctttaacgatgaagtggtggtgccagcgttcctcaaccgtggcgttagcctggaagatgcgcgcgactattccgtagtgggctgtgtggaattatctattcccggcagaacctacggcttgcatgacatcgcgatgtttaatctgctgaaagtgatggaaatctgcctgcatgaaaatgaaggcaatgctgcgctgacttatgaaggtttactggagcagatccgcgccaagatcagccactacatcaccctgatggttgagggcagcaatatttgtgatatcggccatcgcgactgggcacctgtaccgctgctcagtagctttatcagcgattgtctggaaaaaggccgcgatattaccgatggcggcgcgcgttataacttctccggcgtacaggggatcggtatcgccaacctgagcgattctctccatgcgttgaaagggatggtttttgagcaacagcgtttaagttttgacgaattgctgagcgtattaaaagccaacttcgcaacgccagaaggcgaaaaagtccgcgctcgcttaattaaccgcttcgagaaatacggtaacgatatcgacgaggtggataacatcagcgccgaactgttgcgccactactgcaaagaagtggaaaaataccagaacccgcgcggcggctacttcacgccgggaagctataccgtttctgctcacgtcccgttgggaagcgtggttggcgcgacgccagacggtcgttttgccggagaacagctggcagacggcggcttgagtcccatgctgggccaggacgcacaagggccaacagcggtactgaagagtgtcagtaagctcgataacacgctgctgtctaacggtacgttgctgaacgtgaaattcactccggcgaccctggaaggtgaagcaggattacgcaaactggccgacttcttacgggcgtttacccagcttaagttacaacatattcagtttaacgtggtgaacgccgacacgttgcgggaagcgcaacagcgcccacaagattatgccgggctggtggtgcgcgttgccggatacagcgccttctttgtcgaactgagcaaggagatccaggatgacatcatccgccggacagcgcatcagctgtaattaaactgtcgaaggagatccaggatgacaagttccgccggacagcgcatcagctgtaacgttgtggaaacgcgccgcgatgatgtggcgcgcattttcaacattcagcgttatagtctgaatgacggcgagggcattcgtacggtggtcttttttaaaggctgtccgcatctttgcccgtggtgtgctaatccggagagcatctccggcaaaatccagacggtacgcagagaggcgaaatgtctgcactgtgcgaaatgtttgcgtgatgcggatgaatgcccctccggggcgtttgaacggattggtcgcgatatcagccttgacgctctggaacgggaagtgatgaaagatgacattttctttcgcacgtccggcggcggcgtcacgctttctggcggcgaagtgttaatgcaggcggagtttgctacccgttttttacagcgactgcggctgtggggtgtgagttgcgccattgaaactgccggagacgcaccagccagcaagctattaccgctggcgaaattgtgcgatgaagtgttgttcgatttaaaaattatggacgcgactcaggcgcgggatgtggtgaagatgaacctgccacgcgtgctggagaatctgcgtttgctggtgagtgagggcgtcaacgtgatcccgcgtttaccgctgatccctggtttcacgctcagccgggagaatatgcagcaggcgctggatgtactgatcccgctgaatatcaggcagatccatctgttaccgtttcatcagtacggcgaaccgaaataccgcctgctggggaaaacatggagcatgaaagaggtgcctgcgccgagcagtgctgatgtggcaacgatgcgcgaaatggcagaacgggccggacttcaggttaccgtgggaggttaaaatggcatacctggtggcagtaaccgcctgcgtaagcggcgtggcgcatacttatatggcggcggaacggctggaaaagttgtgcctgttagagaagtggggagtcagcattgaaactcagggcgcgctgggaacggagaatcgtttagcggatgaggatatccgccgggcggatgttgctctgttgattacggatatcgagcttgccggtgccgagcgatttgaacattgccgctatgtgcaatgcagcatctacgcattcctgcgtgagccgcagcgggtaatgagcgcggtgcgcaaagtgctttctgcgccgcagcaaacccatcttattctggagtaattattctggagtagtcggtttttctgtcagttggctgtggtactgccggcgatattcgctcgggctgcgttcggtgtttttacgaaacagacggcagaagtagttgctgtcgacaaagccgcaggcgtgcgccacttcttttaccttcaggtcatagcctttcaataacgtcttagcgtgctccagtcgcgtgtgattcaggtattcgttaaaaccaatggcccccgttttttgaaacaggtggctgaggtaatttgggctaatataaaacgcctgtgcaacagattcgcgggtaagcgcggaggcatagcgttcgtcgatataatcgcgaatagcttcaaatagtgcctggctgcgactggcggtctggatttggctgccaagcaaatcgcggcagtggctaagcaggctggcgacgataagccttgccgtttgctgctcctgcggctgcatttgcatttcattgagcgtttgtagcagaaaagaacctatgcgtgggccgcgtcgggcgacgtgttgcttcgccagattttgatattgtttgccatcccattgcacgacgctgaagccgagttgctgtttgccaaacagcacgctaaaggtagtagcgggggcttgccattgtggaaaattccagccaccagcaggaacgtacagcacatcgccgggaactaacgttgctccagcgccggtatcaacaaactcaccttccagcacaatttccagccgtggaaaatcgacctgatacgcaagatcgggcaccgggccgttactgctggcaaagtaaatctggcgcagggacagcgggccgttgatcaggcgggagagcagatagctgacgtcgtgatacatgttattcccttaggtatgtagacgggaaaacagtaactggcattattaaaaaaggccacctgaaaagtgtggcctgaggggagttcgatgtaaacattgcggcagttgtattgccggatgtggcgtaaacgccttatccagcctaccgccgcgatctgtaggccggataagacgcgtcaagcgtcgcatccggcaaatagcgcctggctgataattactgattacccacctgatcgccatagggcagtgtgtcgtaatcgatcagtgcgtttttcttatacgggttaccaatccagcgggtagtttctttgaactgcggattcaccacactacgggttggatcgtaaccgtcgtaagataagcccgccaaatcactccaggtgtggatcagttccgccaggctgtatttacgatcaacatcctggctgaaatcacggggatgagtcgcttgccatttttcactcgtccacagcaggaacggaatggtgtacatatgacgcgtcgggttgtcctcattacgcccctgagttttgtgcggcggcgtgtcgtaaacctcttcaccgtggtcagagaaataaaccaggaaaccgttcgggtttgctgctttaaagtctttaatcaggctggcaaccacatgatcgttatacaggttagcgttgtcataatcgttataactctccagctcttccgcgtttaatcccggcggaacatgatcggtattgccatcaaacttgccctgattttccgggtagcggtatttgtatttgatatgcgtacccagcagatgaacaatgatcagtttcttcggcgcagggtcattcagcacttcctggaacggcttcagcacgttggtgtcgtattcacgcgcactctgcgtacgttgctggttcatgtagtactgcttgtcggtctggcggctaaataccgtcagcatggtattgcgggcggtcatcgtctgctggttggtgatccagaaggttttataacccgcctgtttcatcatgttcatcaggctcggctgcgtcagatacagatccgggttcttttcattggcaaaggtcagcgcctgttgcaggatttcaatggtgtacggacgagacgtaactacgttattaaacacggtcagattcggatcggttttatgcagcgcatccagctccggcgtggtttcacgcggataaccgtacagactcatgcgtccgcgctgggtgctctcgccaatcaccagcactaaagtgcgcggttcgttaccgctttcatctttgaaattagccagtggcggcaaggcattattttcattcagtaactttgttaggctgtttagttgctgacgatactgataatagccggtcaggaattgccacggtgcggcaggctccatacggctggccaggttatccaacgttttctcaaacggcttgtttttgataaacgtattcatggcgatcggatgcagaatcaagccataaagcagggcaaaagagacaacataacgccacggctttggaatatagaccgggcgcaggcgtgtccacagcagaactgccaccgccgtataggccagcgcgataagcacaattttcaggctgaaatactggcttaaatactcgctggcttcgttggtgttggtttcgaacatcacaaacagaacgctctggctgaactcctgaccgtagatgacgtagtagcacagcgccgccagagaggccgcccatagcaccacgccgattactgcggcaataattttaatccgcttcggaaagaggaataccgggatcaaccacaggctactgaataacaggctgtcgcgaatgccgttagtgccactataaccactgatgtaaataatggcctgtagcagagtagagaaaaaccaaaagtagagcagtgcccaacccagggctttccagctaaaaagaggtttagcctggacttctgtggaatgcatagtaagaacctgtcttgaaaaaatatcgccgaatgtaacgacaattccttaaggatatctgaaggtatattcagaatttgaataaaatgcagacagaaatatattgaaaacgagggtgttagaacagaagtatttcagaaaaccctcgcgcaaaagcacgagggtttgcagaagaggaagattagccggtattacgcatacctgccgcaatcccggcaatagtgaccattaacgcttgttcgacgcgaggatccggttcctggccttctttttctgcctggcgggagcggtgcagcaactcggcctgcaatacgttcagcgggtcggtgtaaatattccgtagctgaatagactctgcaatccacggcagatcggccatcagatgggaatcgttggcaatcgccagcaccactttgatgtcttcttcttgcaggttgcgtaactctttacctaacggccacagtgctttgtctaccaggcgttggtcatagtattccgccagccacaggtctgctttggcgaagaccatctccagcatgccgagacgcgtgctgaagaatggccaatcgcggcacatagcctccagctcgctctgtttgccgtcttcgaccactttttgcagcgccgtacctgcacccagccaggcggggagcatcagacggttttgcgtccaggcgaagatccacggaatggcgcgtagactctcgacgccgccggttgggcgacgtttcgccggacgactacccaacggcagtttgcccagttcttgttccggcgtagcggagcggaagtaaggcacaaaatctttgttttcacgtacgtagccgcggtagacatcgcaggagatgacactcagttcatccataatgcgacgccagctctctttcggctccggcggtggcagcaggttggcttccagaatcgccccggtataaaggctcaggctgctgacggtgatttctggcagaccatatttaaagcggatcatctcgccctgttcggttacgcgcaggccgcctttcaggcttcctggcggttgactcagcagcgccgcatgagcaggtgcgccgccgcgaccaatggaaccgccgcgaccgtggaacaacgtcagctcaatacccgctttttcgcaggttttgattaatgcatcctgtgcctgatattgcgcccaggaagctgccatcactcccgcatcttttgcactgtcggaatagccaatcatcaccatctgtttgccctgaatcaggccacgataccagtcaatattgagcagctgggtcatgacatcgttggcgttgttcagatcatcgagggtttcaaacagcggagcaaccggcatcgcaaacccgatacccgcttctttcagcagcaggtggacagccagtacgtcggacggcgttttcgccatgctgatcacgtaggcggcaatggagccttgcggtgcttcggcaatcacctggcaggtatcgagcacttcgcgcgtttcggcgcttggttgccagttgcgcggcagaagcggacgtttggagttcagttcgcggatcaggaacgcctgtttgtcggcctcactccagctttcgtagtcgccgataccgaggtagcgggtcagctcgcccagcgcttcggtatgacgcgtgctctcctgacggatatcaatacggaccagcggtacgccgaaacatttcacgcggcgcagggtgtcgagcagatcgccgttggcgataatacccatgccacacgcctgaagactctggtagcaagcgtagagcggttcccacagttcttcgttttgtgtcagcaggccttctggttttggcagttcttcgcctttcaggcgcgcttccagccatgcctgtgtcgccatcaggcgagaacgcaggtttttcatcagatagcgatacggttctgcggcaccttcttcgccaaccagcgccagcagttcaggggtcgcttcaaccatgctcagttcagaaaccagcacctgaatatctttcaggaacaaatcggtggctttccagcggctgagtagcaggacgtggcgggtgatatcggcagtgacgttcgggttgccgtcgcggtcgccgcccatccagctagtaaaacggaccggaacaaattcgacgggcagtttgtagccgaggttctcttccagttgttcgttcagttcgcgcaggtaatttggtacgccttgccacaggctgttttccactacggcaaagccccatttggcttcatctaccgggcttggacgcagcttacggatttcatcggtatgccaactctgggcgatcaactggcgcaggcgacgcatcagctggttgtgttcgtagtcagcgatatctttgttatcgagctgttttaaacaggcgttcacttccaccattttgtggatcagtgtacgacgggtaatttcggttgggtgagccgtgaggaccagttccaggctcaggctttccactgcttttttgatggtgtcttcgctcagttccggctggtttttcagtttacgcagggtgcgggcgatcacttccgggttgctggcagcttcgcctttcgggctaatgctgtggtattgctcggcggtgttggccaggttcaggaactgactaaacgcacgcgcaacgggcagcagctcgtcgttgctcaaattttgtaaggtggtgagcaactcctggcggttagcatcattgccagcgcgactagatttgctcaacttacggatagtttctacgcgttcaagaatgtgttctcccaacgcatccttgatggtttctcccagcactttgccgagcatactgacattactacgcaatgcggaatattgttcgttcatattaccccagacaccccatcttatcgtttgatagccctgtatccttcacgtcgcattggcgcgaatatgctcgggctttgcttttcgtcgtcttttataaagccacgtaaaagcggtgacgtcaaatgctgcgaaatcgcttcagcaaacgaataaatagcaggaatttacgtcattaaattcacgacgctttaaataagcgtaacttatggaaatgttaaaaaatcgccccaagtaacaccaaaggtgtaggtcggataagatgcgcaagtatcgcatccgacattattgcggcactggagtttggcaacagtgccggatgcggcgcgagcgccttatccggcctacagttgggcatcgtttgagtcactgtcggtcggataagatgcgcaagtatcgcatccgacattattgcggcactggagtttggcaacagtgccggatgcggcgcgagcgccttatccggcctacggttgggcatcgtttgagtcactgtaggtcggataagatgcgcaagcatcgcatccgacattattgcggcactggagtttggcaacagcgccggatgcggcgcgagcgccttatccggcctacgttttaatgccagcaaaaatggtgaattacctgggttatcagttcgcgggtgggcttgataaaccgtgtttccagatattcatcaggttgatgagcctgattaatactgccaggccccaacaccagcgtcgggcataacgtttgaataaacggcgcttcggtacagtagttcaccacttcggtttttgctccgagcaatttctcaaccacttcaaccagttgatgattcggtgggcattcatagccagggatcggcggatgcagctcgtcgaccgtcagacgacccggccagcgttcgctcaccggagccaatgcatcgttgagcaaaccattaagttcattgagtgtcatgccaggcagcggacgaatatccatatgcaactcacagcaagcgcaaatacggttagaagcgtcgccaccgtgaatatgcccgaggttgagcgtagggtatggcacggtaaacgcttcgtagtgataacgttctttcaggttatcgcgcaattgcaaaatatgcccgatggcgtcgtgcattagttcgatagcgttaactccgcgtgctggatcgctggagtgcccgctctggccctgaatacggatggcgttagagatatgacctttatgtgcgcgtaccggttgtagactcgtcggttcgccaatgatggcgcaatccgggcgcagggcggtagtttcggcaaaataacgcgctccggccatactggtttcttcatcagcagtcgccagaatgtagagcggttttttcagtttcgtgacgtcgacatcgcgtagcgcatcaaggataaacgcaaaaaagcctttcatgtcggcggtgcctaagccgtaaagcttgccgtcatgctccgtcagtgtaaacggatcgcgcgtccagcgaccgtcatcaaatggcaccgtatcggtatgccccgccagcaacaagccgccagccccctgtccgatacttgccagcatattgaatttgttgcgagttcctggaacaggctgcacttccacattgaagcccaaatctttaaaccagtccgccagcagagtgattaaatctgcattgctttgatcgagtgcctcttccgtggcgcttatactaggtgtggcaatcagagcgcggtaaatctcgataaatggcggtaatttgtttttcattgttgacacacctctggtcatgatagtatcaatattcatgcagtatttatgaataaaaatacactaacgttgagcgtaataaaacccaccagccgtaaggtgaatgttttacgtttaacctggcaaccagacataagaaggtgaatagccccgatgttgaatacgctgattgtgggtgccagcggctacgctggcgcagagctagtgacctatgtaaatcgccatccgcatatgaacataaccgctttgactgttagtgcgcaaagcaatgatgcgggaaagttaatctccgatttgcatccgcagctaaaaggcatcgttgatctgccgttgcagccgatgagcgatatcagcgagtttagcccaggggtggacgtagtgtttctcgccaccgcccatgaagttagccacgatttagcgccgcagtttcttgaagcgggctgcgtggtgttcgacctttccggcgcgtttcgtgttaacgacgccaccttctatgaaaaatattacggctttacccatcaatacccggaactgttggaacaggcagcctacggtctggcggagtggtgcggtaataaattaaaagaagcgaatttgattgcggtgccgggctgttatccgacggcggcacagctggcgctgaaaccgttgattgatgccgatcttcttgacctcaatcagtggccggtgatcaacgccaccagcggcgtgagcggtgcagggcgtaaagcggccattagtaacagcttttgtgaagttagcctgcaaccgtatggcgtctttactcatcgccatcaaccagagatcgccacacacctcggtgctgacgttatcttcaccccacatctgggcaatttcccgcgcggcattctcgaaaccattacctgccgcctgaaaagcggtgtgacccaggcgcaagtcgcgcaagtgttacagcaggcgtatgcccataaaccgctggtgcggctgtatgacaaaggcgttccggcgctgaaaaatgtcgttgggctgccattttgcgatatcgggtttgccgttcagggcgagcatctgattattgtggcgaccgaagacaacttactgaaaggcgcggcggcacaagcggtacagtgcgccaatattcgtttcggctatgcggaaacgcagtctcttatttaagggtgcaatgatgaatccattaattatcaaactgggcggcgtactgctggatagtgaagaggcgctggaacgtctgtttagcgcactggtgaattatcgtgagagtcatcagcgtccgctggtgattgtgcacggcggcggttgcgtggtggatgagctgatgaaagggctgaatctgccggtgaaaaagaaaaacggcctgcgggtgacgcctgctgatcagatagacattatcaccggagcactggcgggaacggcaaataaaaccctgttggcatgggcgaagaaacatcagattgcggccgtaggtttgtttctcggtgacggcgacagcgtcaaagtgacccagcttgatgaagagttaggtcatgttggactggcgcagccaggtagccctaagcttatcaactccttgctggagaacggttatctgccggtggtcagctccattggcgtaacagacgaagggcaactgatgaacgtcaatgccgaccaggcggcaacggcgctggcggcaacgctgggcgcggatctgattttgctctccgacgtcagcggcattctcgacggcaaagggcaacgcattgccgaaatgaccgccgcgaaagcagaacaactgattgagcagggcattattactgacggcatgatagtgaaagtgaacgcggcgctggatgcggcccgcacgctgggccgtccggtagatatcgcctcctggcgtcatgcggagcagcttccggcactgtttaacggtatgccgatgggtacgcggattttagcttaagttttgttggccggaggcgcagctttccggcattgaatttcaaaataaggaaacagagttatggcactttggggcgggcgttttacccaggcagcagatcaacggttcaaacaattcaacgacagtctgcgctttgattaccgtctggcggagcaggatattgttggctctgtggcctggtccaaagccctggtcacggtaggcgtgttaaccgcagaagagcaggcgcaactggaagaggcgctgaacgtgttgctggaagatgttcgcgccaggccacaacaaatccttgaaagcgacgccgaagatatccatagctgggtggaaggcaaactgatcgacaaagtgggccagttaggcaaaaagctgcataccgggcgtagccgtaatgatcaggtagcgactgacctgaaactgtggtgcaaagataccgttagcgagttactgacggctaaccggcagctgcaaagcgcgctggtggaaaccgcacaaaacaatcaggacgcggtaatgccaggttacactcacctgcaacgcgcccagccggtgacgttcgcgcactggtgcctggcctatgttgagatgctggcgcgtgatgaaagccgtttgcaggatgcgcttaagcgtctggatgtcagcccgctaggctgtggcgcgctggcgggaacggcctatgaaatcgaccgtgaacagttagcaggctggctgggctttgctagcgcgacccgtaacagtctcgacagcgtttctgaccgtgaccatgtgttggaactgctttctgctgccgctatcggcatggtgcatctgagccgttttgctgaagatctgattttctttaacaccggcgaagcggggtttgtggagctttctgaccgcgtgacttccggtagtagtttaatgccgcagaagaaaaacccggatgcgctggagctgattcgcggtaaatgcggccgggtgcagggggcgttaaccggcatgatgatgacgctgaaaggtttgccgctggcttacaacaaagatatgcaggaagacaaagaaggtctgttcgacgcgctcgatacctggctggactgcctgcatatggcggcgctggtgctggacggcattcaggtgaaacgtccacgttgccaggaagcggctcagcagggttacgccaacgccaccgaactggcggattatctggtggcgaaaggcgtaccgttccgcgaggcgcaccatattgttggtgaagcggtggtggaagccattcgtcagggcaaaccgctggaagatctgccgctcagtgagttgcagaaattcagtcaggtgattgacgaagatgtctatccgattctgagcctgcaaagctgcctcgacaagcgtgcggcaaaaggcggcgtcagtccgcagcaggtggcgcaggcgattgcttttgcgcaggctcggttagggtaagaacatttatatgtataaatttgagcctggcttatcgccgggcttttttatggcaaaaaaaagcggatcctggagatccgcaaaagttcacgttggctttagttattcgagttgagaaactctcgaaacgggcagtgacttcaagggttaaaagaggtgccgctccgtttctgtgagcaattatcagtcagaatgcttgatagggataatcgttcattgctattctacctatcgccatgaactatcgtggcgatggaggatggataatgaatattcgtgatcttgagtacctggtggcattggctgaacaccgccattttcggcgtgcggcagattcctgccacgttagccagccgacgcttagcgggcaaattcgtaagctggaagatgagctgggcgtgatgttgctggagcggaccagccgtaaagtgttgttcacccaggcgggaatgctgctggtggatcaggcgcgtaccgtgctgcgtgaggtgaaagtccttaaagagatggcaagccagcagggcgagacgatgtccggaccgctgcacattggtttgattcccacagttggaccgtacctgctaccgcatattatccctatgctgcaccagacctttccaaagctggaaatgtatctgcatgaagcacagacccaccagttactggcgcaactggacagcggcaaactcgattgcgtgatcctcgcgctggtgaaagagagcgaagcattcattgaagtgccgttgtttgatgagccaatgttgctggctatctatgaagatcacccgtgggcgaaccgcgaatgcgtaccgatggccgatctggcaggggaaaaactgctgatgctggaagatggtcactgtttgcgcgatcaggcaatgggtttctgttttgaagccggggcggatgaagatacacacttccgcgcgaccagcctggaaactctgcgcaacatggtggcggcaggtagcgggatcactttactgccagcgctggctgtgccgccggagcgcaaacgcgatggggttgtttatctgccgtgcattaagccggaaccacgccgcactattggcctggtttatcgtcctggcagtccgctgcgcagccgctatgagcagctggcagaggccatccgcgcaagaatggatggccatttcgataaagttttaaaacaggcggtttaaaccgtttaacgcagctacccgataggcttccgccatcgtcgggtagttaaaggtggtgttgacgaagtactcaatagtgttgccgccacctttctgttccataatcgcctgaccgatatgaataatttcggcagcgcgctcgccaaagcagtgaatacccagaatctcttttgtttcccgatggaacaaaattttcagcgtgcccacgttcatgccgacgatttgtgcgcgtgccagatgtttaaactgggcgcggcccacttcatatggcactttcattgcggtcagctgctgttcggttttgcccacagagctgatttccgggatggtgtaaataccggtagggatatcttcaatcagatgtgcggtggcttcgccttttaccagcgcctgcgcggcaatgcgcccctggtcataggccgcgctcgccaggctcggataaccaatcacgtcgcccaccgcgtaaacgtgtggctgtgcggtctgatacatgctgttgaccttcagctgtccgcggctgtcagtttctagcccaatgttctgtaacgccaggctatcggtattaccggtgcgaccgttggcatagagcaggcagtcagctttcagttttttaccgctcttcagatgcatgatcacaccatcgtcacagccttcgatcttctcgtactcttcgttgtgacgaatcactacgccactgttccagaagtgataggagagagaatcactcatctcttgatcgagaaatgccagcaggcgatcgcgggtgttgatcagatccacttttacatccataccgcggaagatgctcgcatattcacagccgatcactccagcaccatagataagtacatggcgcggttcgtggtgcatgctgagaatactgtcgctgtcgtaaatgcgtggatgggtgaaatcaacatctgttggatgatatggacgagagccgcaggcaataacaaatttttcagcggttagtgtttcaacgctgccgtccgggcaatccagcgccaacgtatgctcgtcaacaaagcgagcgtttccctgcaatatttcacagtgattacgttcgtaaaatccctgacgcatgcgcgtttgttgattaatcacgttatcggcatggttaaggatatcggcaaaagaagagcggagcagtcgggaatggtcgctgtaaagtgggttttgattgaattctataatgcggctgacggcgtgacggagagctttgctcgggatggtgccccagtgggtgcaaccgccgccaacattttgataacgctcgataactgcgacgcgcgcaccttgcttaaccaggcccattgcagcgccttcgccgccggggccggaacctattactatggcatcgtaatcgtaggaatgtggcatggtagggcttacctgttcttatacataaaagcaacagaatggtaacattttatcgcgggtaagccaattgatccccgtcatttatctggctatatcctgagcggcctttgctttgtctgtttcttacttttgccctgacgttttattggatttttatcgacgatactctccgtttaagcggcaggtttccgctgtacgtaaaagaaccggccaaagaattgcagtaaatatgttttattgcgttaccgttcattcacaatactggagcaatccagtatgttcattctctggtatagtgccagcagtacttttggcaaggatagtgacatcgtgatgggcgtaagagcgcaacaaaaagaaaaaacccgccgtagcctggtggaagccgcatttagccaattaagtgctgaacgcagcttcgccagcctgagtttgcgtgaagtggcgcgtgaagcgggcattgctcccacctctttttatcggcatttccgcgacgtagacgaactgggtctgaccatggttgatgagagcggtttaatgctacgccaactcatgcgccaggcgcgtcagcgtatcgccaaaggcgggagtgtgatccgcaccagcgtctccacatttatggagttcatcggtaataatcctaacgccttccggttattattgcgggaacgctccggcacctccgctgcgtttcgtgccgccgttgcgcgtgaaattcagcacttcattgcggaacttgcggactatctggaactcgaaaaccatatgccgcgtgcgtttactgaagcgcaagccgaagcaatggtgacaattgtcttcagtgcgggtgccgaggcgttggacgtcggcgtcgaacaacgtcggcaattagaagagcgactggtactgcaactgcgaatgattagcaaaggggcttattactggtatcgccgtgaacaagagaaaaccgcaattattccgggaaatgtgaaggacgagtaatgaaacaagcaaatcaagatagaggtacgctgctgctggcgttagttgctggcttaagcattaatggtactttcgcagcgctgtttagctccattgtgccattttctgtattcccgattatttccctggtgctgacggtttactgcctgcatcaacgttatcttaatcgcactatgccggtaggcttgccgggtctggcagctgcctgttttattctcggcgtactgctgtacagcacggtagttcgtgcggaatatccggatatcggctctaacttcttcccggcagtactctccgtcattatggtgttctggattggcgcgaagatgcgtaaccgtaagcaggaagttgctgagtaatcggtattatgccggatgctggcgcatccggcatgggttttacttcgcggtcagtaatacgccgcactccatatggtgcgtgtaggggaactgatcaaacagagccagacgttcgaccttgtgcgtctggcttaatgtttccagattcttgcataacgtttccgggttacaggagatgtacaaaatacgcggatacgcctgcaccattttctcggtttcactgtccagaccgctgcgcggagggtcgacaaaaatggtttcgcactgataactctttaagtcgatcccttgcaggcggttaaactcgcgcacaccattcatcgcctgagtaaattcttctgccgccatacgaataatttgtacgttatcaatatggttagctgcgatgttgtattgcgcagcagcaacgctcggcttagcgatttcggtggctaatacccgatcaaaattacgcgccagcgctaaactaaagttaccgttgccgcagtacagctccagtaaatcgcctttactgcctttggttacgtccagcgcccattccagcatctgaatattcatcgccgcgttcggctgggtaaagctgttttctacctgacggtagatcatctctttccctgcgaccggcagacgttcatcgatgtaatcctgatccagctcgattttggttttcgttgcccgaccaatcagatgcacattcagattctgcgcgcgcagtgcatcgcgcagggcctccgcttcctgacgccactcatcatccagcttcttatggtatagcagggaaaccaccgcctgattactcagtgtagtgaggtaatcaatctggaacaacttgtggcgcagaacgggattattacgcacacccgcaatcatcgccgtcatcaactggttgataagttcactggcggcggggaagctatccacgcggatgcggcttttggtttgttgatcgaaaatgatgtgatacaggtcatcgccatcgtgccagatgcggaactccgcgcgcatccggtaatgactgaccgggctgcgaaacacttccggaaccaggtcagaaaacggtgccatcatactttgcaaacgtaccactttttcggctaactgcgcttcatactgttctgttggaaggtgttcgggggtcatgatgtatcctgaaaaattaaagtacgcggcgattgtagggattgctcatcagatgtccagatcttgatgaattcctatttgtgagctacgtctggacagtaacttgttacaacctgtagcatccacttgccggtcctgtgagttaatagggaatccagtgcgaatctggagctgacgcgcagcggtaaggaaaggtgcgatgattgcgttatgcggacactgccattcggtgggaagtcatcatctcttagtatcttagatacccctccaagcccgaagacctgccggccaacgtcgcatctggttctcatcatcgcgtaatattgatgaaacctgcggcatccttcttctattgtggatgctttacaatgattaaaaaagctagcctgctgacggcgtgttccgtcacggcattttccgcttgggcacaggataccagcccggatactctcgtcgttactgctaaccgttttgaacagccgcgcagcactgtgcttgcaccaaccaccgttgtgacccgtcaggatatcgaccgctggcagagcaccagcgtcaatgatgtgctgcgccgtcttccgggcgtcgatatcacccaaaacggcggtagtggtcagctcagttctatttttattcgcggtacaaatgccagtcatgtgttggtgttaattgatggcgtacgcctgaatctggcgggggtgagtggttctgccgaccttagccagttccctattgcgcttgtccagcgtgttgaatatatccgtgggccgcgctccgctgtttatggttccgatgcaataggcggggtggtgaatatcatcacgacgcgcgatgaacccggaacggaaattagtgcagggtggggaagcaatagttatcagaactatgatgtctctacgcagcaacaactgggggataagacacgggtaacgctgttgggcgattatgcccatactcatggttatgatgttgttgcctatggtaataccggaacgcaagcgcagacagataacgatggttttttaagtaaaacgctttatggcgcgctggagcataactttactgatgcctggagcggctttgtgcgcggctatggctatgataaccgtaccaattatgacgcgtattattctcccggtagtccgttgctcgatacccgtaaactctatagccaaagttgggacgccgggctgcgctataacggcgaactgattaaaagtcaactcattaccagctatagccatagcaaagattacaactacgatccccattatggtcgttatgatagcagcgcgacgctcgatgagatgaagcaatacaccgtccagtgggcaaacaatgtcatcgttggtcacggtagtattggtgcgggtgtcgactggcagaaacagactacgacgccgggtacaggttatgttgaggatggatatgatcaacgtaataccggcatctatctgaccgggctgcaacaagtcggcgattttacctttgaaggcgcagcacgcagtgacgataacagtcagtttggtcgtcatggaacctggcaaaccagcgccggttgggaattcatcgaaggttatcgcttcattgcttcctacgggacatcttataaggcaccaaatctggggcaactgtatggcttctacggaaatccgaatctggacccggagaaaagcaaacagtgggaaggcgcgtttgaaggcttaaccgctggggtgaactggcgtatttccggatatcgtaacgatgtcagtgacttgatcgattatgatgatcacaccctgaaatattacaacgaagggaaagcgcggattaagggcgtcgaggcgaccgccaattttgataccggaccactgacgcatactgtgagttatgattatgtcgatgcgcgcaatgcgattaccgacacgccgttgttacgccgtgctaaacagcaggtgaaataccagctcgactggcagttgtatgacttcgactggggtattacttatcagtatttaggcactcgctatgataaggattacagttcttatccttatcaaaccgttaaaatgggcggtgtgagcttgtgggatcttgcggttgcgtatccggtcacctctcacctgacagttcgtggtaaaatagccaacctgttcgacaaagattatgagacagtctatggctaccaaactgcaggacgggaatacaccttgtctggcagctacaccttctgaaccacgtcccaccgtgctggtgtttgactccggcgtcggtgggttgagcgtctatgacgagatccggcatctcttaccggatctccattacatttatgctttcgataacgtcgctttcccgtatggcgaaaaaagcgaagcgtttattgttgagcgagtggtggcaattgtcaccgcggtgcaagaacgttatccccttgcgctggctgtggtcgcttgcaacactgccagtaccgttagtcttcctgcattacgcgaaaagttcgacttcccggttgttggtgtcgtgccggcgattaaacctgctgcacgtctgacggcaaatggcattgtcggattactggcaacccgcggaacagttaaacgttcttatactcatgagctgatcgcgcgtttcgctaatgaatgccagatagaaatgctgggcagcgcagagatggttgagttggctgaagcgaagctacatggcgaagatgtttctctggatgcactaaaacgtatcctacgcccgtggttaagaatgaaagagccgccagataccgttgtattgggttgcacccatttccctctactacaagaagaactgttacaagtgctgccagagggaacccggctggtggattctggcgcagcgattgctcgccgaacggcctggttgttagaacatgaagccccggatgcaaaatctgccgatgcgaatattgccttttgtatggcaatgacgccaggagctgaacaattattgcccgttttacagcgttacggcttcgaaacgctcgaaaaactggcagttttaggctgatttggttgaatgttgcgcggtcagaaaattattttaaatttcctcttgtcaggccggaataactccctataatgcgccaccactgacacggaacaacggcaaacacgccgccgggtcagcggggttctcctgagaactccggcagagaaagcaaaaataaatgcttgactctgtagcgggaaggcgtattatgcacaccccgcgccgctgagaaaaagcgaagcggcactgctctttaacaatttatcagacaatctgtgtgggcactcgaagatacggattcttaacgtcgcaagacgaaaaatgaataccaagtctcaagagtgaacacgtaattcattacgaagtttaattctttgagcgtcaaacttttaaattgaagagtttgatcatggctcagattgaacgctggcggcaggcctaacacatgcaagtcgaacggtaacaggaagaagcttgcttctttgctgacgagtggcggacgggtgagtaatgtctgggaaactgcctgatggagggggataactactggaaacggtagctaataccgcataacgtcgcaagaccaaagagggggaccttcgggcctcttgccatcggatgtgcccagatgggattagctagtaggtggggtaacggctcacctaggcgacgatccctagctggtctgagaggatgaccagccacactggaactgagacacggtccagactcctacgggaggcagcagtggggaatattgcacaatgggcgcaagcctgatgcagccatgccgcgtgtatgaagaaggccttcgggttgtaaagtactttcagcggggaggaagggagtaaagttaatacctttgctcattgacgttacccgcagaagaagcaccggctaactccgtgccagcagccgcggtaatacggagggtgcaagcgttaatcggaattactgggcgtaaagcgcacgcaggcggtttgttaagtcagatgtgaaatccccgggctcaacctgggaactgcatctgatactggcaagcttgagtctcgtagaggggggtagaattccaggtgtagcggtgaaatgcgtagagatctggaggaataccggtggcgaaggcggccccctggacgaagactgacgctcaggtgcgaaagcgtggggagcaaacaggattagataccctggtagtccacgccgtaaacgatgtcgacttggaggttgtgcccttgaggcgtggcttccggagctaacgcgttaagtcgaccgcctggggagtacggccgcaaggttaaaactcaaatgaattgacgggggcccgcacaagcggtggagcatgtggtttaattcgatgcaacgcgaagaaccttacctggtcttgacatccacggaagttttcagagatgagaatgtgccttcgggaaccgtgagacaggtgctgcatggctgtcgtcagctcgtgttgtgaaatgttgggttaagtcccgcaacgagcgcaacccttatcctttgttgccagcggtccggccgggaactcaaaggagactgccagtgataaactggaggaaggtggggatgacgtcaagtcatcatggcccttacgaccagggctacacacgtgctacaatggcgcatacaaagagaagcgacctcgcgagagcaagcggacctcataaagtgcgtcgtagtccggattggagtctgcaactcgactccatgaagtcggaatcgctagtaatcgtggatcagaatgccacggtgaatacgttcccgggccttgtacacaccgcccgtcacaccatgggagtgggttgcaaaagaagtaggtagcttaaccttcgggagggcgcttaccactttgtgattcatgactggggtgaagtcgtaacaaggtaaccgtaggggaacctgcggttggatcacctccttaccttaaagaagcgtactttgtagtgctcacacagattgtctgatagaaagtgaaaagcaaggcgtttacgcgttgggagtgaggctgaagagaataaggccgttcgctttctattaatgaaagctcaccctacacgaaaatatcacgcaacgcgtgataagcaattttcgtgtccccttcgtctagaggcccaggacaccgccctttcacggcggtaacaggggttcgaatcccctaggggacgccacttgctggtttgtgagtgaaagtcgccgaccttaatatctcaaaactcatcttcgggtgatgtttgagatatttgctctttaaaaatctggatcaagctgaaaattgaaacactgaacaacgagagttgttcgtgagtctctcaaattttcgcaacacgatgatgaatcgaaagaaacatcttcgggttgtgaggttaagcgactaagcgtacacggtggatgccctggcagtcagaggcgatgaaggacgtgctaatctgcgataagcgtcggtaaggtgatatgaaccgttataaccggcgatttccgaatggggaaacccagtgtgtttcgacacactatcattaactgaatccataggttaatgaggcgaaccgggggaactgaaacatctaagtaccccgaggaaaagaaatcaaccgagattcccccagtagcggcgagcgaacggggagcagcccagagcctgaatcagtgtgtgtgttagtggaagcgtctggaaaggcgcgcgatacagggtgacagccccgtacacaaaaatgcacatgctgtgagctcgatgagtagggcgggacacgtggtatcctgtctgaatatggggggaccatcctccaaggctaaatactcctgactgaccgatagtgaaccagtaccgtgagggaaaggcgaaaagaaccccggcgaggggagtgaaaaagaacctgaaaccgtgtacgtacaagcagtgggagcacgcttaggcgtgtgactgcgtaccttttgtataatgggtcagcgacttatattctgtagcaaggttaaccgaataggggagccgaagggaaaccgagtcttaactgggcgttaagttgcagggtatagacccgaaacccggtgatctagccatgggcaggttgaaggttgggtaacactaactggaggaccgaaccgactaatgttgaaaaattagcggatgacttgtggctgggggtgaaaggccaatcaaaccgggagatagctggttctccccgaaagctatttaggtagcgcctcgtgaattcatctccgggggtagagcactgtttcggcaagggggtcatcccgacttaccaacccgatgcaaactgcgaataccggagaatgttatcacgggagacacacggcgggtgctaacgtccgtcgtgaagagggaaacaacccagaccgccagctaaggtcccaaagtcatggttaagtgggaaacgatgtgggaaggcccagacagccaggatgttggcttagaagcagccatcatttaaagaaagcgtaatagctcactggtcgagtcggcctgcgcggaagatgtaacggggctaaaccatgcaccgaagctgcggcagcgacgcttatgcgttgttgggtaggggagcgttctgtaagcctgcgaaggtgtgctgtgaggcatgctggaggtatcagaagtgcgaatgctgacataagtaacgataaagcgggtgaaaagcccgctcgccggaagaccaagggttcctgtccaacgttaatcggggcagggtgagtcgacccctaaggcgaggccgaaaggcgtagtcgatgggaaacaggttaatattcctgtacttggtgttactgcgaaggggggacggagaaggctatgttggccgggcgacggttgtcccggtttaagcgtgtaggctggttttccaggcaaatccggaaaatcaaggctgaggcgtgatgacgaggcactacggtgctgaagcaacaaatgccctgcttccaggaaaagcctctaagcatcaggtaacatcaaatcgtaccccaaaccgacacaggtggtcaggtagagaataccaaggcgcttgagagaactcgggtgaaggaactaggcaaaatggtgccgtaacttcgggagaaggcacgctgatatgtaggtgaggtccctcgcggatggagctgaaatcagtcgaagataccagctggctgcaactgtttattaaaaacacagcactgtgcaaacacgaaagtggacgtatacggtgtgacgcctgcccggtgccggaaggttaattgatggggttagcgcaagcgaagctcttgatcgaagccccggtaaacggcggccgtaactataacggtcctaaggtagcgaaattccttgtcgggtaagttccgacctgcacgaatggcgtaatgatggccaggctgtctccacccgagactcagtgaaattgaactcgctgtgaagatgcagtgtacccgcggcaagacggaaagaccccgtgaacctttactatagcttgacactgaacattgagccttgatgtgtaggataggtgggaggctttgaagtgtggacgccagtctgcatggagccgaccttgaaataccaccctttaatgtttgatgttctaacgttgacccgtaatccgggttgcggacagtgtctggtgggtagtttgactggggcggtctcctcctaaagagtaacggaggagcacgaaggttggctaatcctggtcggacatcaggaggttagtgcaatggcataagccagcttgactgcgagcgtgacggcgcgagcaggtgcgaaagcaggtcatagtgatccggtggttctgaatggaagggccatcgctcaacggataaaaggtactccggggataacaggctgataccgcccaagagttcatatcgacggcggtgtttggcacctcgatgtcggctcatcacatcctggggctgaagtaggtcccaagggtatggctgttcgccatttaaagtggtacgcgagctgggtttagaacgtcgtgagacagttcggtccctatctgccgtgggcgctggagaactgaggggggctgctcctagtacgagaggaccggagtggacgcatcactggtgttcgggttgtcatgccaatggcactgcccggtagctaaatgcggaagagataagtgctgaaagcatctaagcacgaaacttgccccgagatgagttctccctgaccctttaagggtcctgaaggaacgttgaagacgacgacgttgataggccgggtgtgtaagcgcagcgatgcgttgagctaaccggtactaatgaaccgtgaggcttaaccttacaacgccgaagctgttttggcggatgagagaagattttcagcctgatacagattaaatcagaacgcagaagcggtctgataaaacagaatttgcctggcggcagtagcgcggtggtcccacctgaccccatgccgaactcagaagtgaaacgccgtagcgccgatggtagtgtggggtctccccatgcgagagtagggaactgccaggcatcaaataaaacgaaaggctcagtcgaaagactgggcctttcgttttatctgttgtttgtcggtgaacgctctcctgagtaggacaaatccgccgggagcggatttgaacgttgcgaagcaacggcccggagggtggcgggcaggacgcccgccataaactgccaggcatcaaattaagcagaaggccatcctgacggatggcctttttgcgtttctacaaactcttcctgtcgtcatatctacaagccatccccccacagatacggtaaactagcctcgtttttgcatcaggaaagcagctatgaaccactccttaaaaccctggaacacatttggcattgatcataatgctcagcacattgtatgtgccgaagacgaacaacaattactcaatgcctggcagtatgcaaccgcagaaggacaacccgttcttattctgggtgaaggaagtaatgtactttttctggaggactatcgcggcacggtgatcatcaaccggatcaaaggtatcgaaattcatgatgaacctgatgcgtggtatttacatgtaggagccggagaaaactggcatcgtctggtaaaatacactttgcaggaaggtatgcctggtctggaaaatctggcattaattcctggttgtgtcggcagtagtcctatccagaatattggtgcttatggcgtagaattacagcgagtttgcgcttatgttgattctgttgaactggcgacaggcaagcaagtgcgcttaactgccaaagagtgccgttttggctatcgcgacagtatttttaaacatgaataccaggaccgcttcgctattgtagccgtaggtctgcgtctgccaaaagagtggcaacctgtactaacgtatggtgacttaactcgtctggatcctacaacagtaacgccacagcaagtatttaatgcggtgtgtcatatgcgcaccaccaaactccctgatccaaaagtgaatggcaatgccggtagtttcttcaaaaaccctgttgtatctgccgaaacggctaaagcattactgagtcaatttccaacagcaccaaattacccccaggcggatggtagtgtaaaactggcagcaggttggcttatcgatcagtgccagctaaaagggatgcaaataggtggggctgcggtgcaccgtcaacaggcgttagttctcattaatgaagacaatgcaaaaagcgaagatgttgtacagctggcgcatcatgtaagacagaaagttggtgaaaaatttaatgtctggcttgagcctgaagtccgctttattggtgcaagtggtgaagtgagcgcagtggagacaattagttgaaataaagcgcagtggagacaatttcatgaaggataacaccgtgccactgaaattgattgccctgttagcgaacggtgaatttcactctggcgagcagttgggtgaaacgctgggaatgagccgggcggctattaataaacacattcagacactgcgtgactggggcgttgatgtctttaccgttccgggtaaaggatacagcctgcctgagcctatccagttacttaatgctaaacagatattgggtcagctggatggcggtagtgtagccgtgctgccagtgattgactccacgaatcagtaccttcttgatcgtatcggagagcttaaaagcggcgatgcttgcattgcagaataccagcaggctggccgtggtcgccggggtcggaaatggtttagcccttttggcgcaaacttatatttgagcatgttctggcgtctggaacaaggcccggcggcggcgattggtttaagtctggttatcggtatcgtgatggcggaagtattacgcaagctgggtgcagataaagttcgtgttaaatggcctaatgacctctatctgcaggatcgcaagctggcaggcattctggtggagctgactggcaaaactggcgatgcggcgcaaatagtcattggagccgggatcaacatggcaatgcgccgtgttgaagagagtgtcgttaatcaggggtggatcacgctgcaggaagcggggatcaatctcgatcgtaatacgttggcggccatgctaatacgtgaattacgtgctgcgttggaactcttcgaacaagaaggattggcaccttatctgagccgctgggaaaagctggataattttattaatcgcccagtgaaacttatcattggtgataaagaaatatttggcattagtcgcggaatagacaaacagggggctttattacttgagcaggatggaataataaaaccctggatgggcggtgaaatatccctgcgtagtgcagaaaaataagaaaggggagtattcgctcccctgcaaattatttgcgtagtctgacctcttctaccgcatgattagcacttttcgtcaggattaaactggcgcgctcacgagtaggtagaatattttgctttaagttcagccagttgatctctttccacaatgtcatggcagtcttaatcgcttcttctttagttaatttcgcgtagttatgaaaataggaatccgggtcggtaaaagccccttcgcggaatttcagaaaacggttgatataccatgtctgaagtaagtcttccggtgcatcaacatatatgctaaaatcgacaaaatcagaaacaaatacatgatgtggatcgtgtggataatccatcccgctctgtaagacatttaacccttcaagaattaaaatatcaggctgaacaaccgttttatctccatccgggatcacatcataaataagatgactgtaaacaggtgctgtaacgtttggcacgccggatttgagatcggaaacaaacttcaccaggcgatgcatatcatagctttccgggaagcctttcttcttcatcagaccacgttctttcagaacctgattagggtgaaggaagccatctgtagtgatcagttcaacacgacgatgttccggccaacggcttaatagcgcctgcaatacacgggcggttgtacttttccccaccgcgacactgccagcaatactgataatgtaaggaatgcgttgcccgttggtaccaagaaactgttccagaactgcctgacggcgcagattgctgcttatatagaagttcagcaaacgactcaaaggtaaatagatctcggcaacttcttctaagctgagatcttcattaatacctttgagacgggcgatctcatcttcgcttaacgtcataggtacggaatcacgcagagctgcccactggttgcggtcaaactgtaggtaaggcgtcattaacgtttgctcttttatactcataagcatgtttctggcggtcatagctctatcggcaaagcgatatttgccatggcgcgtcacagttctgttgaatgggttaatgggcaggagggtaacaccagatggggaggaataataagaaaaaatctctgccaggaagctatcgttgaaaagcaatgtgacagatattccatctgataaaaagaattatggtttagcaggagcgcattgttgagcacaatgatgttgaaaaagtgtgctaatctgccctccgttcggctgtttcttcatcgtgtcgcataaaatgtgaccaataaaacaaattatgcaattttttagttgcatgaactcgcatgtctccatagaatgcgcgctacttgatgccgacttagctcagtaggtagagcaactgacttgtaatcagtaggtcaccagttcgattccggtagtcggcaccatcaagtccggtggggttcccgagcggccaaagggagcagactgtaaatctgccgtcacagacttcgaaggttcgaatccttcccccaccaccaatttcggccacgcgatggcgtagcccgagacgataagttcgcttaccggctcgaataaagagagcttctctcgatattcagtgcagaatgaaaatcaggtagccgagttccaggatgcgggcatcgtataatggctattacctcagccttccaagctgatgatgcgggttcgattcccgctgcccgctccaagatgtgctgatatagctcagttggtagagcgcacccttggtaagggtgaggtcggcagttcgaatctgcctatcagcaccacttcttttctcctccctgttttttccttctgtttattgcattcaacaagtcgggcatgttgcctggttgatgtggtgatatcaccgatttatccgtgtcttagagggacaatcgatgtctaaagaaaagtttgaacgtacaaaaccgcacgttaacgtcggtactatcggccacgttgaccatggtaaaacaacgctgaccgctgcaatcactaccgtactggctaaaacctacggcggtgctgctcgcgcattcgaccagatcgataacgcgccggaagaaaaagctcgtggtatcaccatcaacacttctcacgttgaatacgacaccccgacccgtcactacgcacacgtagactgcccggggcacgccgactatgttaaaaacatgatcaccggtgctgcgcagatggacggcgcgatcctggtagttgctgcgactgacggcccgatgccgcagactcgtgagcacatcctgctgggtcgtcaggtaggcgttccgtacatcatcgtgttcctgaacaaatgcgacatggttgatgacgaagagctgctggaactggttgaaatggaagttcgtgaacttctgtctcagtacgacttcccgggcgacgacactccgatcgttcgtggttctgctctgaaagcgctggaaggcgacgcagagtgggaagcgaaaatcctggaactggctggcttcctggattcttacattccggaaccagagcgtgcgattgacaagccgttcctgctgccgatcgaagacgtattctccatctccggtcgtggtaccgttgttaccggtcgtgtagaacgcggtatcatcaaagttggtgaagaagttgaaatcgttggtatcaaagagactcagaagtctacctgtactggcgttgaaatgttccgcaaactgctggacgaaggccgtgctggtgagaacgtaggtgttctgctgcgtggtatcaaacgtgaagaaatcgaacgtggtcaggtactggctaagccgggcaccatcaagccgcacaccaagttcgaatctgaagtgtacattctgtccaaagatgaaggcggccgtcatactccgttcttcaaaggctaccgtccgcagttctacttccgtactactgacgtgactggtaccatcgaactgccggaaggcgtagagatggtaatgccgggcgacaacatcaaaatggttgttaccctgatccacccgatcgcgatggacgacggtctgcgtttcgcaatccgtgaaggcggccgtaccgttggcgcgggcgttgtagcaaaagttctgagctaattgccgataacatttgacgcaatgcgcactaaaagggcatcatttgatgccctttttgcacgctttcgtaccagaacctggctcatcagtgattttctttgtcataatcattgctgagacaggctctgttgagggcgtataatccgaaaagctaatacgcgtttcgatttggtttgcctcgcgatcgcggggtgaaaatgtttgtagaaaacttctgacaggttggtttatgagtgcgaataccgaagctcaaggaagcgggcgcggcctggaagcgatgaagtgggtcgttgtggtggcattgctcctggtggcgattgtcggcaactatctttatcgcgacattatgctgccgctgcgtgcgctggccgtagtaattctgattgctgcagcgggtggtgtcgcgctgttaacgacaaaaggtaaagctaccgttgcttttgcccgtgaagcgcgtaccgaagtccgtaaggtcatttggccgactcgccaggaaacattgcacaccacgctgattgtggctgcggttaccgcagtaatgagtctgatcctgtggggactggatggtattctggttcgcctggtatcctttatcactggcctgaggttctgagatgtctgaagctcctaaaaagcgctggtacgtcgttcaggcgttttccggttttgaaggccgcgtagcaacgagcctgcgtgagcatatcaaattacacaacatggaagatttgtttggtgaagtcatggtaccaaccgaagaagtggttgaaatccgtggcggtcagcgtcgcaaaagcgaacgtaaattcttccctggctacgtcctcgttcagatggtgatgaacgacgcgagctggcacctggtgcgcagcgtaccgcgtgtgatgggcttcatcggcggtacttccgatcgtcctgcgccaatcagcgataaagaagtcgatgcgattatgaaccgcctgcagcaggttggtgataagccgcgtccgaaaacgctgtttgaaccgggtgaaatggtccgtgttaatgatggtccgttcgctgacttcaacggtgttgttgaagaagtggattacgagaaatctcgtctgaaagtgtctgtttctatcttcggtcgtgcgaccccggtagagctggacttcagccaggttgaaaaagcctaacccagcgatcaaaaaagcggcgatttaatcgttgcacaaggcgtgagattggaatacaatttcgcgccttttgtttttatgggccttgcccgtaaaacgattttttatatcacggggagcctctcagaggcgttattacccaacttgaggaatttataatggctaagaaagtacaagcctatgtcaagctgcaggttgcagctggtatggctaacccgagtccgccagtaggtccggctctgggtcagcagggcgtaaacatcatggaattctgcaaagcgttcaacgcaaaaactgattccatcgaaaaaggtctgccgattccggtagtaatcaccgtttacgctgaccgttctttcactttcgttaccaagaccccgccggcagcagttctgctgaaaaaagcggctggtatcaagtctggttccggtaagccgaacaaagacaaagtgggtaaaatttcccgcgctcagctgcaggaaatcgcgcagaccaaagctgccgacatgactggtgccgacattgaagcgatgactcgctccatcgaaggtactgcacgttccatgggcctggtagtggaggactaagaaatggctaaactgaccaagcgcatgcgtgttatccgcgagaaagttgatgcaaccaaacagtacgacatcaacgaagctatcgcactgctgaaagagctggcgactgctaaattcgtagaaagcgtggacgtagctgttaacctcggcatcgacgctcgtaaatctgaccagaacgtacgtggtgcaactgtactgccgcacggtactggccgttccgttcgcgtagccgtatttacccaaggtgcaaacgctgaagctgctaaagctgcaggcgcagaactggtaggtatggaagatctggctgaccagatcaagaaaggcgaaatgaactttgacgttgttattgcttctccggatgcaatgcgcgttgttggccagctgggccaggttctgggtccgcgcggcctgatgccaaacccgaaagtgggtactgtaacaccgaacgttgctgaagcggttaaaaacgctaaagctggccaggttcgttaccgtaacgacaaaaacggcatcatccacaccaccatcggtaaagtggactttgacgctgacaaactgaaagaaaacctggaagctctgctggttgcgctgaaaaaagcaaaaccgactcaggcgaaaggcgtgtacatcaagaaagttagcatctccaccaccatgggtgcaggtgttgcagttgaccaggctggcctgagcgcttctgtaaactaatgcctttacgtgggcggtgattttgtctacaatcttacccccacgtataatgcttaatgcagacgtatatccgagatattcgggttgtggcaaggcggcaactgagtgagtcgccaggagcatagctaactatgtgactggtgcgaatgaaggaagccaacgccgtcacaagctgaatagcgacggatagaaaagatttgttcgttggagcctggcctatccaggcctccgtcgaagaccgcaggagtttcgcaagaaacttaatcccctgcgtagacggtgacagaacgctaagattattcttttatattctggcttgtttctgctcaccgtaattaagacgctctctccgtttggaggagtgaagtgagttccagagattttctctggcaaacatccaggagcaaagctaatggctttaaatcttcaagacaaacaagcgattgttgctgaagtcagcgaagtagccaaaggcgcgctgtctgcagtagttgcggattcccgtggcgtaactgtagataaaatgactgaactgcgtaaagcaggtcgcgaagctggcgtatacatgcgtgttgttcgtaacaccctgctgcgccgtgctgttgaaggtactccgttcgagtgcctgaaagacgcgtttgttggtccgaccctgattgcatactctatggaacacccgggcgctgctgctcgtctgttcaaagagttcgcgaaagcgaatgcaaaatttgaggtcaaagccgctgcctttgaaggtgagctgatcccggcgtctcagatcgaccgcctggcaactctgccgacctacgaagaagcaattgcacgcctgatggcaaccatgaaagaagctagcgctggcaaactggttcgtactctggctgctgtacgcgatgcgaaagaagctgcttaatcgcagttatctttttaacgcattcgcttacgtataaacttattctgatattcaggaacaatttaaatgtctatcactaaagatcaaatcattgaagcagttgcagctatgtctgtaatggacgttgtagaactgatctctgcaatggaagaaaaattcggtgtttccgctgctgctgctgtagctgtagctgctggcccggttgaagctgctgaagaaaaaactgaattcgacgtaattctgaaagctgctggcgctaacaaagttgctgttatcaaagcagtacgtggcgcaactggcctgggtctgaaagaagctaaagacctggtagaatctgcaccggctgctctgaaagaaggcgtgagcaaagacgacgcagaagcactgaaaaaagctctggaagaagctggcgctgaagttgaagttaaataagccaacccttccggttgcagcctgagaaatcaggctgatggctggtgactttttagtcaccagcctttttgcgctgtaaggcgccagtagcgtttcacactgtttgactactgctgtgcctttcaatgcttgtttctatcgacgacttaatatactgcgacaggacgtccgttctgtgtaaatcgcaatgaaatggtttaagcgtgatagcaacaggcattgcggaaagtgttccattttccggtcaacaaaatagtgttgcacaaactgtccgctcaatggacagatgggtcgacttgtcagcgagctgaggaaccctatggtttactcctataccgagaaaaaacgtattcgtaaggattttggtaaacgtccacaagttctggatgtaccttatctcctttctatccagcttgacagctttcagaaatttatcgagcaagatcctgaagggcagtatggtctggaagctgctttccgttccgtattcccgattcagagctacagcggtaattccgagctgcaatacgtcagctaccgccttggcgaaccggtgtttgacgtccaggaatgtcaaatccgtggcgtgacctattccgcaccgctgcgcgttaaactgcgtctggtgatctatgagcgcgaagcgccggaaggcaccgtaaaagacattaaagaacaagaagtctacatgggcgaaattccgctcatgacagacaacggtacctttgttatcaacggtactgagcgtgttatcgtttcccagctgcaccgtagtccgggcgtcttctttgactccgacaaaggtaaaacccactctagcggtaaagtgctgtataacgcgcgtatcatcccttaccgtggttcctggctggacttcgaattcgatccgaaggacaacctgttcgtacgtatcgaccgtcgccgtaaactgcctgcgaccatcattctgcgcgccctgaactacaccacagagcagatcctcgacctgttctttgaaaaagttatctttgaaatccgtgataacaagctgcagatggaactggtgccggaacgcctgcgtggtgaaaccgcatcttttgacatcgaagctaacggtaaagtgtacgtagaaaaaggccgccgtatcactgcgcgccacattcgccagctggaaaaagacgacgtcaaactgatcgaagtcccggttgagtacatcgcaggtaaagtggttgctaaagactatattgatgagtctaccggcgagctgatctgcgcagcgaacatggagctgagcctggatctgctggctaagctgagccagtctggtcacaagcgtatcgaaacgctgttcaccaacgatctggatcacggcccatatatctctgaaaccttacgtgtcgacccaactaacgaccgtctgagcgcactggtagaaatctaccgcatgatgcgccctggcgagccgccgactcgtgaagcagctgaaagcctgttcgagaacctgttcttctccgaagaccgttatgacttgtctgcggttggtcgtatgaagttcaaccgttctctgctgcgcgaagaaatcgaaggttccggtatcctgagcaaagacgacatcattgatgttatgaaaaagctcatcgatatccgtaacggtaaaggcgaagtcgatgatatcgaccacctcggcaaccgtcgtatccgttccgttggcgaaatggcggaaaaccagttccgcgttggcctggtacgtgtagagcgtgcggtgaaagagcgtctgtctctgggcgatctggataccctgatgccacaggatatgatcaacgccaagccgatttccgcagcagtgaaagagttcttcggttccagccagctgtctcagtttatggaccagaacaacccgctgtctgagattacgcacaaacgtcgtatctccgcactcggcccaggcggtctgacccgtgaacgtgcaggcttcgaagttcgagacgtacacccgactcactacggtcgcgtatgtccaatcgaaacccctgaaggtccgaacatcggtctgatcaactctctgtccgtgtacgcacagactaacgaatacggcttccttgagactccgtatcgtaaagtgaccgacggtgttgtaactgacgaaattcactacctgtctgctatcgaagaaggcaactacgttatcgcccaggcgaactccaacttggatgaagaaggccacttcgtagaagacctggtaacttgccgtagcaaaggcgaatccagcttgttcagccgcgaccaggttgactacatggacgtatccacccagcaggtggtatccgtcggtgcgtccctgatcccgttcctggaacacgatgacgccaaccgtgcattgatgggtgcgaacatgcaacgtcaggccgttccgactctgcgcgctgataagccgctggttggtactggtatggaacgtgctgttgccgttgactccggtgtaactgcggtagctaaacgtggtggtgtcgttcagtacgtggatgcttcccgtatcgttatcaaagttaacgaagacgagatgtatccgggtgaagcaggtatcgacatctacaacctgaccaaatacacccgttctaaccagaacacctgtatcaaccagatgccgtgtgtgtctctgggtgaaccggttgaacgtggcgacgtgctggcagacggtccgtccaccgacctcggtgaactggcgcttggtcagaacatgcgcgtagcgttcatgccgtggaatggttacaacttcgaagactccatcctcgtatccgagcgtgttgttcaggaagaccgtttcaccaccatccacattcaggaactggcgtgtgtgtcccgtgacaccaagctgggtccggaagagatcaccgctgacatcccgaacgtgggtgaagctgcgctctccaaactggatgaatccggtatcgtttacattggtgcggaagtgaccggtggcgacattctggttggtaaggtaacgccgaaaggtgaaactcagctgaccccagaagaaaaactgctgcgtgcgatcttcggtgagaaagcctctgacgttaaagactcttctctgcgcgtaccaaacggtgtatccggtacggttatcgacgttcaggtctttactcgcgatggcgtagaaaaagacaaacgtgcgctggaaatcgaagaaatgcagctcaaacaggcgaagaaagacctgtctgaagaactgcagatcctcgaagcgggtctgttcagccgtatccgtgctgtgctggtagccggtggcgttgaagctgagaagctcgacaaactgccgcgcgatcgctggctggagctgggcctgacagacgaagagaaacaaaatcagctggaacagctggctgagcagtatgacgaactgaaacacgagttcgagaagaaactcgaagcgaaacgccgcaaaatcacccagggcgacgatctggcaccgggcgtgctgaagattgttaaggtatatctggcggttaaacgccgtatccagcctggtgacaagatggcaggtcgtcacggtaacaagggtgtaatttctaagatcaacccgatcgaagatatgccttacgatgaaaacggtacgccggtagacatcgtactgaacccgctgggcgtaccgtctcgtatgaacatcggtcagatcctcgaaacccacctgggtatggctgcgaaaggtatcggcgacaagatcaacgccatgctgaaacagcagcaagaagtcgcgaaactgcgcgaattcatccagcgtgcgtacgatctgggcgctgacgttcgtcagaaagttgacctgagtaccttcagcgatgaagaagttatgcgtctggctgaaaacctgcgcaaaggtatgccaatcgcaacgccggtgttcgacggtgcgaaagaagcagaaattaaagagctgctgaaacttggcgacctgccgacttccggtcagatccgcctgtacgatggtcgcactggtgaacagttcgagcgtccggtaaccgttggttacatgtacatgctgaaactgaaccacctggtcgacgacaagatgcacgcgcgttccaccggttcttacagcctggttactcagcagccgctgggtggtaaggcacagttcggtggtcagcgtttcggggagatggaagtgtgggcgctggaagcatacggcgcagcatacaccctgcaggaaatgctcaccgttaagtctgatgacgtgaacggtcgtaccaagatgtataaaaacatcgtggacggcaaccatcagatggagccgggcatgccagaatccttcaacgtattgttgaaagagattcgtagcctgggtatcaacatcgaactggaagacgagtaattctcgctcaaacaggtcactgctgtcgggttaaaacccggcagcggattgtgctaactccgacgggagcaaatccgtgaaagatttattaaagtttctgaaagcgcagactaaaaccgaagagtttgatgcgatcaaaattgctctggctagcccagacatgatccgtagttggtctttcggtgaagttaaaaagccggaaaccatcaactaccgtacgttcaaaccagaacgtgacggccttttctgcgcccgtatctttgggccggtaaaagattacgagtgcctgtgcggtaagtacaagcgcctgaaacaccgtggcgtcatctgtgagaagtgcggcgttgaagtgacccagactaaagtacgccgtgagcgtatgggccacatcgaactggcttccccgactgcgcacatctggttcctgaaaagcctgccgtcccgtatcggtctgctgctcgatatgccgctgcgcgatatcgaacgcgtactgtactttgaatcctatgtggttatcgaaggcggtatgaccaacctggaacgtcagcagatcctgactgaagagcagtatctggacgcgctggaagagttcggtgacgaattcgacgcgaagatgggggcggaagcaatccaggctctgctgaagagcatggatctggagcaagagtgcgaacagctgcgtgaagagctgaacgaaaccaactccgaaaccaagcgtaaaaagctgaccaagcgtatcaaactgctggaagcgttcgttcagtctggtaacaaaccagagtggatgatcctgaccgttctgccggtactgccgccagatctgcgtccgctggttccgctggatggtggtcgtttcgcgacttctgacctgaacgatctgtatcgtcgcgtcattaaccgtaacaaccgtctgaaacgtctgctggatctggctgcgccggacatcatcgtacgtaacgaaaaacgtatgctgcaggaagcggtagacgccctgctggataacggtcgtcgcggtcgtgcgatcaccggttctaacaagcgtcctctgaaatctttggccgacatgatcaaaggtaaacagggtcgtttccgtcagaacctgctcggtaagcgtgttgactactccggtcgttctgtaatcaccgtaggtccatacctgcgtctgcatcagtgcggtctgccgaagaaaatggcactggagctgttcaaaccgttcatctacggcaagctggaactgcgtggtcttgctaccaccattaaagctgcgaagaaaatggttgagcgcgaagaagctgtcgtttgggatatcctggacgaagttatccgcgaacacccggtactgctgaaccgtgcaccgactctgcaccgtctgggtatccaggcatttgaaccggtactgatcgaaggtaaagctatccagctgcacccgctggtttgtgcggcatataacgccgacttcgatggtgaccagatggctgttcacgtaccgctgacgctggaagcccagctggaagcgcgtgcgctgatgatgtctaccaacaacatcctgtccccggcgaacggcgaaccaatcatcgttccgtctcaggacgttgtactgggtctgtactacatgacccgtgactgtgttaacgccaaaggcgaaggcatggtgctgactggcccgaaagaagcagaacgtctgtatcgctctggtctggcttctctgcatgcgcgcgttaaagtgcgtatcaccgagtatgaaaaagatgctaacggtgaattagtagcgaaaaccagcctgaaagacacgactgttggccgtgccattctgtggatgattgtaccgaaaggtctgccttactccatcgtcaaccaggcgctgggtaaaaaagcaatctccaaaatgctgaacacctgctaccgcattctcggtctgaaaccgaccgttatttttgcggaccagatcatgtacaccggcttcgcctatgcagcgcgttctggtgcatctgttggtatcgatgacatggtcatcccggagaagaaacacgaaatcatctccgaggcagaagcagaagttgctgaaattcaggagcagttccagtctggtctggtaactgcgggcgaacgctacaacaaagttatcgatatctgggctgcggcgaacgatcgtgtatccaaagcgatgatggataacctgcaaactgaaaccgtgattaaccgtgacggtcaggaagagaagcaggtttccttcaacagcatctacatgatggccgactccggtgcgcgtggttctgcggcacagattcgtcagcttgctggtatgcgtggtctgatggcgaagccggatggctccatcatcgaaacgccaatcaccgcgaacttccgtgaaggtctgaacgtactccagtacttcatctccacccacggtgctcgtaaaggtctggcggataccgcactgaaaactgcgaactccggttacctgactcgtcgtctggttgacgtggcgcaggacctggtggttaccgaagacgattgtggtacccatgaaggtatcatgatgactccggttatcgagggtggtgacgttaaagagccgctgcgcgatcgcgtactgggtcgtgtaactgctgaagacgttctgaagccgggtactgctgatatcctcgttccgcgcaacacgctgctgcacgaacagtggtgtgacctgctggaagagaactctgtcgacgcggttaaagtacgttctgttgtatcttgtgacaccgactttggtgtatgtgcgcactgctacggtcgtgacctggcgcgtggccacatcatcaacaagggtgaagcaatcggtgttatcgcggcacagtccatcggtgaaccgggtacacagctgaccatgcgtacgttccacatcggtggtgcggcatctcgtgcggctgctgaatccagcatccaagtgaaaaacaaaggtagcatcaagctcagcaacgtgaagagcgttgtgaactccagcggtaaactggttatcacttcccgtaatactgaactgaaactgatcgacgaattcggtcgtactaaagaaagctacaaagtaccttacggtgcggtactggcgaaaggcgatggcgaacaggttgctggcggcgaaaccgttgcaaactgggacccgcacaccatgccggttatcaccgaagtaagcggttttgtacgctttactgacatgatcgacggccagaccattacgcgtcagaccgacgaactgaccggtctgtctagcctggtggttctggattccgcagaacgtaccgcaggtggtaaagatctgcgtccggcactgaaaatcgttgatgctcagggtaacgacgttctgatcccaggtaccgatatgccagcgcagtacttcctgccgggtaaagcgattgttcagctggaagatggcgtacagatcagctctggtgacaccctggcgcgtattccgcaggaatccggcggtaccaaggacatcaccggtggtctgccgcgcgttgcggacctgttcgaagcacgtcgtccgaaagagccggcaatcctggctgaaatcagcggtatcgtttccttcggtaaagaaaccaaaggtaaacgtcgtctggttatcaccccggtagacggtagcgatccgtacgaagagatgattccgaaatggcgtcagctcaacgtgttcgaaggtgaacgtgtagaacgtggtgacgtaatttccgacggtccggaagcgccgcacgacattctgcgtctgcgtggtgttcatgctgttactcgttacatcgttaacgaagtacaggacgtataccgtctgcagggcgttaagattaacgataaacacatcgaagttatcgttcgtcagatgctgcgtaaagctaccatcgttaacgcgggtagctccgacttcctggaaggcgaacaggttgaatactctcgcgtcaagatcgcaaaccgcgaactggaagcgaacggcaaagtgggtgcaacttactcccgcgatctgctgggtatcaccaaagcgtctctggcaaccgagtccttcatctccgcggcaagcttccaggagaccactcgcgtgctgaccgaagcagccgttgcgggcaaacgcgacgaactgcgcggcctgaaagagaacgttatcgtgggtcgtctgatcccggcaggtaccggttacgcgtaccaccaggatcgtatgcgtcgccgtgctgcgggtgaagctccggctgcaccgcaggtgactgcagaagacgcatctgccagcctggcagaactgctgaacgcaggtctgggcggttctgataacgagtaatcgttaatccgcaaataacgtaaaaacccgcttcggcgggtttttttatggggggagtttagggaaagagcatttgtcagaatatttaaggaatttctgaatactcataatcaatgtagagatgactaatatcctgaaactgactgaactaattgagtcaaactcggcaaggattcgatactattcctgtgtaactttcttaaggaacgagaatgaaacaggaagtggaaaagtggcgaccttttggacatccggatggtgatattcgtgatttaagttttcttgatgctcatcaggctgtctacgttcagcatcatgagggcaaagagcctttagagtatcgcttttgggttacctactctcttcactgcttcacaaaagattatgaacatcagacgaacgaagaaaaacaaagcttaatgtaccacgcgcctaaagaatctcgtcccttctgccagcaccgttataacttagcgcgcacacacttaaaaagaactattttggcgctgccagaaagcaacgttattcatgccgggtatggtagctatgccgtgattgaggtggacttagacggaggagataaggcattttactttgttgcgttcagggctttcagggaaaagaaaaaactccgtttgcatgtaactagcgcttatcccatttctgaaaaacagaaaggtaaaagtgtgaaatttttcaccattgcctacaacttattgagaaataagcagcttcctcagcccagtaaataacaaaacccaccttaaggtgggtttcgccagagaattatctctggtattcagaacgccattaccggactttgccttgaccttgcgataatcgcaggttgcgggatgtctgaatttcttcagtctgctgcatcctggaagatgagaacatgtgttcttattttcgtctctatcatagttgagtatttactctcttacaatcagatctctttcattgctcaacaggcgatggcttcagactttgcattacggaatttttaagaaaggcagggcgaaacgaggaagaagcttttcgccctggacaacattcctgctgacggcactaccataaaaaaacacaacgctttcaacaaccttgcgtttttcatcttccgtagcggctcggaataaatttacgttcttacattccgtctcatagtctttggctggcgcgtcccagatagctgtcccagtctttccataccggctgcaaaccctgagcggttaacgcggcagcaaccgcttccggtctgcgatcgtcgtgcggactgaactgttccaactcggggtgattatcggcatagccacctggctgcgttttgctgaaggcgctgacgttattgatcgccagcggaataacgcgatcgcgaaaccacggactttcccgcgtggagagactcagttcaatctccggtgcaagcagtcggaaggcgcagatggtttgcactaactggcgttcatccataatgctcgcaggctcaatgccgccagtacacgggcgcaggcgcggaaaggagacagagtaacggctttgccagtaatgctgttgcagccatagcaaatgttcggcaaccatatagctgtcaacgcgccagttgtcggaaaggccaattagcgcgccgaggcctatcttatcaatccccgcacgccccagccgatccggcgtttccagccgccagaagaagtcctgttttttgcctttcagatgatggcgggcataagtcgcctcgtgatatgtctcctgataaaccatcacgccatccagaccaagttgctttaactcggcgtattccgtctccgccagcggttgcacttccatctgtagactagagaactgttcacgaagggcagggagatgacgacgaaagtaatccatccccactttcgcctgatgttcaccagtgactaacagcagatgttcaaagcccatctcccgtatagcggcactttccctggcaatatccgcttcatccagcgttttgcgcttgatgcgattactcatggaaaatccacagtacgtgcagtcgttagcgcaaagattggaaagataaagcgggacgtagaaactaactgtgttgccaaatcgctgacgggtcagacgctgcgcccgttgggccagttgttccagatagccactggcggcagggcttaacagcgccatcatgtcgtcgcgggtgagttggctggcatttagcgcccgctctacgtcagcagccgttttgccgttgatacgcaggcggatgtcgtcccagtccagttgtcgccagcgatcgctgaaggttttcatgcgcttgcctccagaaatccggtcagcgggctggtggcatgagcaaaataactgcggctgcccggtccggactgacgtgccagtaggcctgcttctaccgccagacgaaatgccttcgccatgttgacgggatcgtccgcgacggcaatcgccgtattcactaacaccgcgtcggcccccatttccagcgcctgcgcggcatggctgggaacgccgatgccagcatcgacaaccaccggcactgtggcctgctggataataatctccagcatggcgcgggtttccagtccctgattgctgccaatcggcgcgccgagcggcatcaccgctgcacagccgacttcttccagacgtttacacaataccggatcggccccgcagtaaggcagcacgacaaatccctgttgtaccagcgtttcggcggctttcagggtttcgatgggatcgggcaacagccagcgggcgtcagggtgaatctctaattttaaccagtttgtgcctaacgcttcacgagccagatgggcggcgaaaatggcttcttccgctgttttcgccccggatgtatttggcagcagggtcacacccgccgcgataagcggttcgaggatagcgtcgttgtgctggcgcaagtcgacacgtttcatcgccagtgtcaccagctggctgccggaagcgcggatcgcctccaccatcagttgactagaagcgaatttccctgtgccggtaaacagatgactatcaaacgttttgtccgcaatacgtaacatttcaaccccctgcaataacctgaaaaagcaggatctggtcgccatcctgcacgatatgttgcgcccactgctcacgcgggacgatttgctgattaatcgccagagccgcgcccgcttgtcgttggtcgagttgctccagtagttcgtgaacagtttgcccggcggcgcactgcatcgcttgatcgttaaacaggatctgcattgcttcctccgcataccgggcaaccactggcgcggcgcaacgccaggctgcgccactggctgcttttaccgtcgaacagtcggagttctcccgcaggtgtctctataccgcttaataacttaatggcttccagtgcctgcaaagtgcccataaccccgaccaccgggccaaccacgcccgccgtgcggcagttgcgttctggctcctggttatctggccacaggcagcggtaacacccctgctcccagggcggcgtcagtaccatcaactgaccgccaaatccgaccgcgctggcggtgataagcggcgtgttgagtgccacgcaggcggcattaatctcctggcgagtcgccatattgtcggtacagtcgagcaccacatcggcccgtgcaaccgcatcttttaacgcctcacccgttaaccgttgttgtaatgctgtcagttgaatgtcgggattcaactgtgtcagtcgctgttggctgacctggcttttcgggcgatcgatatcttcagtggtaaagaggatttgtcgttgcagattgcttaaatgcacatcgtcgtcatctgccagtaccagcgtcccgacgccagcgcccgccaggtacagcgcagcaggtgtacccagcccgcccagaccgataatcagcacctggctgtcgagcagtttttgctgcccgtccagagcgatatcgtcgagcaggatttggcggctataacgcataaagtcacggtcattcatcgccaactcctgcaatttccagcaactgtgccgttgccaaacgccagtctgcggcttgagtaatggcgctgacgacggcgatactgccgacacccgttgctatcaccgcaggcgcgcgtgccagactgataccgccaatcgccacggtgggataatccgccagtcgctcaacatgccgtgccagctgttccagcccctgcggtgcagaaggcatctgtttggtttgcgtcgggaacacatgtcccagcgcgatataagaggggcgtgctgccagcgcgacgtcgatttccatatcgtcatgtgtgctaacgcccagccgcaggcctgccgcgcggatggcattgagatcggtggcttgcaaatcttcctgccccaaatggacgccatacgcctgatgcttgatcgccagccgccagtaatcgttgataaacaatcgcgcgttatagcggcggcccagcgcaattgccgccacgacatcggcttccacctcttcatcgcgccgatctttgatgcgtagctggagagtacgtacgcctgcatccaacagacgttcgatccactgtacgctgtccaccaccgggtacagtccactacgaaaaggtacaggaggaaaatcaggctgatacatcacgcttcctccttacgcaggtagatttctccgcctctggcacggaagttctcgctcatatccgccattcccatttcaatagtttgcgtggcggcgtaatcacgcacttcctggctgattttcatgctgcagaatttcggcccacacatggagcaaaaatgggcgactttaccactctcttgcggcagggtttcatcgtgataagcgcgggcggtaaacgggtcgagggccagattaaactggtcttcccagcgaaattcgaagcgggctttgctcatggcgttatcgcgaatttgcgcgcccggatgccctttcgccaggtcagcggcgtgggcagcaatcttataggtgataagcccctgcttaacatcttctttattgggcagacccagatgctcttttggcgttacgtaacagagcatcgcgcagccaaaccagccaatcatcgccgcaccaatcccgctcgtgaagtggtcatagcccggcgcaatatcggtagttagcggccccagagtgtaaaacggcgcttcgtggcagtgctctaactcctcggtcatattgcggcggatcatctgcatcggcacgtggcctgggccttcaatcatcacctgcacgtcatattcccaggcaattttggtcagttcgcccagcgtatgcagctcggcaaactgcgcttcatcgttggcgtcctgaatagaaccggggcgcagaccgtcgcccaggctcaggctaacgtcataagcggcacagatttcacaaatttcgcggaagtgttgatagaggaaattttcctgatgatgggagaggcaccatttcgccataatgctaccgccgcgagagacgataccggtcaggcgtttcgcggtcatcggcacatagcgcagcagtacgcccgcatggatagtgaagtaatccacaccttgctcggcctgttccagcagcgtgtcgcggaacgcttcccaggtaagatcttcggcgatcccgttaaccttctccagcgcctggtagatcggcactgtaccgatcggcaccgggctgttacgcaaaatccactcgcgggtttcgtgaatatagcgaccggtggagagatccatcaccgtatccgctccccagcgcgtggaccataccagcttttccacttcttcttcgatggaagaggtgaccgcgctgttgccgatattggcgttaacttttaccaggaaattgcgaccaataatcatcggctcgctttccggatgattaatgttggccgggataatcgcacgtccggcagcaacttcatcacggacaaattccgcagtgatattttccggcagatgtgcgccaaagctcattcccggatgctggtggcgtaaaacctcgctacggatgcgctcgcggcccatattctcgcggatggcgatgaattccatttccggcgtgatgatgccctggcgggcgtagtgcagttgggtgacacggcgtcctgctttggcgcgttttggtgttagtacgccgctaaaacgcagttcgtcgaggccatcatctgccagccgcgctttagtgtaatcggaactgcgcacggtaagttcttcggtatcgccgcgcgcatcgatccacggctggcgtagttttgccagcccttgctgcacgttaatggcaatctgcggatcaccatacgggccggaggtgtcgtagaccggaatcgcttcgttttcttcgtactgcggctgttctttgctaccgccaattagcgtcgggctaagctggatctcacgcatcggcacgcgcacgccggggtgtgtgccagtgatataaatgcgtttactgttgggaaaggcggtgccttccagggtgtcgataaaatgttgggcccgggcgcgttgttcgcggcgggtcagttttgttgcagacatagctcattccaaaaagttaaggacgtggcttgtcagacgacggatgaagcaagagacgatcgccgcaggggcgatgcgatagcagattaactcttgttcccttcgcaggtattagcctgatcaggttccgcggatcccgaataaacggtctcagccagttaaggcactccgacaagaaattagccccgcaaatggggcattgaatgtaaattacgcgttaacagcgcagaactcaagcaggatgtttgacgcgggcggcgtcaagcaccagcagaatcagcttatcttccagcacaaagcgcgcttccagcgcctcgccgatgtcagataaaacctgttgaaactcaaggtaattatcatgatcgatggcggtttccagactggaatcgtagtaatccataatctgttgagtattggcttcgagttgcggccaaatcttcgcggcgcgcgcgagttgcccgttgccttccagcttatgaagaatgcgctcataaatactgaaatgtccggcagacaagtaatcgaccaggctctgacaaaaatcatcaagggctttttcgtttagcctcatgtagctttctttgccaggcttaatgccaaccagattgtagtaagccacgagcagatgcttacgtacatgtagccagcgatcaaccagtttgttacttcctctgacgcgctccgtcaggttatcgagctggttaagcatgattgactccgcaagtttgtattcaaaaactgctcagtgagaaatgtaaaaaccatgttaaacatgccagtgatgcaaaggtagtgcaagagctatggatcgtataattgaaaaattagatcacggctggtgggtcgtcagccatgaacaaaaattatggttgccgaagggagaattgccatatggcgaagcggcaaatttcgatcttgtgggtcagcgcgcactacaaatcggcgaatggcagggggaacctgtttggttagtacaacagcagcggcgtcacgatatggggagcgtacgtcaggtcattgatctcgatgttgggctgtttcaactggccggacgaggcgtacaactggcggagttttaccgaagccataaatactgtggttactgcgggcatgaaatgtatccgagcaaaaccgaatgggcgatgctgtgcagccattgccgtgagcgttactacccgcaaatcgccccctgcattattgttgccatccgtcgcgatgatagcatcctcctcgcccagcatacccgccatcgtaacggtgtccatacagtacttgccggattcgtcgaagtgggcgaaaccctcgagcaggcagtcgcgcgggaagtgatggaagagagcggaattaaagttaaaaacttgcgttacgtgacttctcagccgtggccgtttcctcagtctttaatgaccgcgtttatggcggaatatgacagcggcgacatcgtgatcgacccgaaagaattgctcgaggcgaactggtatcgctatgacgatttgccgttactcccgccgcccggcaccgtagcgcgccgtctgatagaagatacggtggcgatgtgtcgggcagagtatgagtgatgatacactgaccgcctgacgcactaaggaacagccaaaatgaccgaacttaaaaacgatcgttatctgcgggcgctgctgcgccagcccgttgatgtcactccagtatggatgatgcgccaggcgggtcgctatctaccggaatataaagccacgcgcgcccaggcaggcgattttatgagcctgtgcaaaaacgccgagctggcgtgcgaagtgactttgcaaccgctgcgtcgctacccgctggatgcggcgatcctcttttccgatatcctcaccgtgccggacgcgatggggttagggctctattttgaagccggagaaggtccgcgttttaccagcccagtcacctgcaaagctgacgtcgataaactgccaattccggacccggaagatgaactgggttacgtgatgaacgcggtgcgtaccattcgtcgcgaactgaaaggcgaagtgccgctgattggtttttccggcagcccgtggacgctggcgacctacatggtggaaggcggcagcagcaaagccttcaccgtgatcaaaaaaatgatgtatgccgatccgcaggcgctgcacgctctgctcgataaactggcgaaaagcgtcactttgtatctgaatgcgcagattaaagccggtgctcaggcagtgatgattttcgacacctggggcggcgtgcttaccgggcgcgattatcaacagttcagcctctattacatgcataaaattgttgatggtttactgcgtgaaaacgacggtcgccgcgtaccggtcacgctgtttaccaaaggcggcggacagtggctggaagccatggcagaaaccggttgcgatgcgctgggcctcgactggacaacggacatcgccgatgcgcgccgccgtgtgggcaataaagtcgcgttgcagggtaatatggatccgagcatgctgtacgcgccgcctgcccgcattgaagaagaagtagcgactatacttgcaggtttcggtcacggcgaaggtcatgtctttaaccttggtcacggcattcatcaggatgtgccgccagaacatgctggcgtgttcgtggaggcagtgcatcgactgtctgaacagtatcaccgctaaggagtgattatggatctcgcgagtttacgcgctcaacaaatcgaactggcttcttctgtgatccgcgaggatcgactcgataaagatccaccggatctgatcgccggagccgatgtcgggtttgagcagggcggagaagtgacgcgagcggcgatggtgctgctgaaatatcccagccttgagctggtcgagtataaagttgcccgcatcgccaccaccatgccttacattccaggttttctttccttccgcgaatatcctgcgctgctggcagcgtgggagatgctgagccaaaagccggatttagtgtttgtcgatggtcatgggatcagccatcctcgccgtcttggcgtcgccagccattttggcttattggtggatgtgccgaccattggcgtggcgaaaaaacggctctgcggtaaattcgaaccgctctccagcgaaccgggcgcgctggccccactgatggataaaggcgagcagctggcctgggtctggcgcagcaaagcgcgctgtaacccgttgtttatcgctaccggccatcgggtcagcgtggacagcgcgctggcgtgggtacaacgctgcatgaaaggctatcgtctgccggagccaacgcgctgggcggacgcggtggccagcgaacgtccggcgttcgtgcgctatacagcaaatcagccctaattcaggtaaactgcggataatttccgtatttgagaactcaacatgttacaaaacccaattcatctgcgtctggagcgcctggaaagctggcagcatgtcactttcatggcttgcttatgcgaacgcatgtaccccaattacgccatgttctgccagcaaaccggttttggtgatgggcaaatttaccgtcgcattctcgatctcatctgggaaacgctgaccgttaaagacgcaaaagtaaatttcgacagccaactggagaaatttgaagaagcgattcctagtgccgacgatttcgatctgtacggcgtttatccggcaatcgatgcctgcgtggcgttaagtgaactggtccatagccgtttgagtggtgaaacgctcgaacacgcggtggaagtgagtaagacctccatcacgaccgttgcgatgctggaaatgactcaggctggtcgcgaaatgagcgatgaagagcttaaagaaaacccagctgtagagcaagaatgggacattcagtgggaaatattccgacttttagctgagtgcgaagaacgcgatatcgagctgataaaaggccttagggcagacctgcgtgaggcgggtgagagcaatattggtataatttttcagcaataagaccagaaaacgtgatttaacgcctgatttgtcgtacctggagtcttccctttcgccccccgtctggtctacatttggggggcgaaaaaaagtggctatcggtgcgtgtatgcaggagagtgctattctggcatttccgtcgcactcgatgcttagcaagcgataaacacattgtaaggataacttatgaacaagactcaactgattgatgtaattgcagagaaagcagaactgtccaaaacccaggctaaagctgctctggagtccactctggctgcaattactgagtctctgaaagaaggcgatgctgtacaactggttggtttcggtaccttcaaagtgaaccaccgcgctgagcgtactggccgcaacccgcagaccggtaaagaaatcaaaattgccgcagctaacgtaccggcatttgtttctggcaaggcactgaaagacgcagttaagtaagattgcgtggcagtgaacagttttaacgaaggggtggttagtccccttttgtctttctggcgtcgaagtttgatgctggctggcgctctgcttctcactgcctgtagtcataactctagtcttcctccctttaccgccagtggatttgctgaagaccagggcgcggtacgcatctggcgaaaagacagcggcgataatgtgcatctgcttgccgtgtttagcccgtggcgcagtggcgataccacgacgcgagagtatcgctggcagggcgataacctcacgctcatcaatatcaatgtttacagcaaaccgccggtgaatattcgcgcgcgttttgacgatcgcggtgatctgagctttatgcaacgtgaatccgatggggaaaagcagcagctttctaacgaccaaatcgatttataccgttatcgtgctgatcagatccgccagattagcgatgccttacgtcaggggagagtcgtgctgcgccaggggcgctggcatgcgatggaacagaccgtgaccacctgcgaagggcaaaccattaaacctgatttagatagccaggcgatagcgcatatcgagcgccgccagagccgctcttctgttgatgtcagcgtggcatggctggaagcgcccgaaggtagccaattactgttagtggcaaactctgatttctgtcgctggcaacccaacgagaaaacgttctgatttaccagtggcccatacccatatgaccgccaccaccgcagccgccgtagcccatgcccattccggctccgcgcggaatacccgcttcagccatcgcgatatctcgtttcacccgtaactcatctaagctctgacgcaaattctccatctctttggcgaccgcgttaattttgctgctatccggtgggttcgcggctaacagggcattgtattcataacgcttcgtcaccagttgctgttgcagtgcgctgctttgagcgtaaaagtcattatggattttctgccacgctgtctgttgttcgctggtcaaaggcgcggcattttgctgccacataccgtgtccgccgtgagcaaatgcagatgtgcttcccatcgccattgcactaagcgccatcattaccagggcaattttcgtgttccgtttcatggttaatcctccagtggttgtcttacttcgggtattgcatcttccgtgccaacgatgaaacgctgatatgacgggtaatctggcatgataaacgagtaaaaatgactcgcctgctgcgggtagcgagtcatttttactcattgaaacttaagcctttgtgttacagcgcagggtaagcgctgataaaagatggcatgatttctgctgtcagaaagggatgagcaggcaaagaagaagatgcgttttatgcaacgttctaaagactccttagctaaatggttaagcgcgatcctccccgtggtcattgttgggctggtgggattgtttgcggtaactgtgattcgtgattatgggcgggcaagcgaggcagaccgccaggcattactggaaaaaggtaatgtgcttatccgcgctctggagagcggaagccgcgtagggatggggatgcgaatgcaccatgtacagcaacaggcgcttctggaagagatggcgggacagccgggagtgttgtggttcgcagtcaccgatgcgcagggcatcattattcttcatagcgaccccgataaggtcgggcgtgcgctctatagcccggatgaaatgcagaaattaaagccagaggaaaactcccgctggcggctgcttgggaaaacggaaactacgcctgcacttgaggtctatcgtttgttccagccaatgagtgcgccctggcggcatggaatgcacaatatgccgcgctgtaacggcaaagctgtgccacaagtagatgcacaacaggctatttttatcgccgttgatgccagtgatctggttgcaacccagagtggggaaaagcgcaataccctgattatcctcttcgccctggcgacggtcttgctggcaagcgtattgagtttcttctggtatcgccgctatctgcgcagccgccagcttctacaagatgaaatgaagcgcaaagagaagctggtggcgctggggcatcttgcggcaggcgttgcccacgaaatccgtaacccactttccagcattaaaggactggcgaaatactttgccgagcgcgcgcctgcagggggagaagcgcatcaactggcgcaggtgatggcgaaagaggccgaccgtttaaaccgcgtggtaagcgagttgctggaactggttaagccaacgcatctggctttgcaggcggtggatctcaacacgctgattaaccacagtttacagctggtaagtcaggatgcaaacagccgggagatccagttacgctttaccgccaacgacacattaccggaaattcaggccgacccggacaggctgactcaggtcctgttgaatctctatctcaatgctattcaggcgattggtcagcatggcgtgattagcgtgacggccagcgaaagcggcgcgggcgtgaaaatcagcgttaccgacagcggtaagggaattgcggcagatcagcttgatgccatcttcactccgtacttcaccactaaagccgaaggcaccggattggggctggcggtcgtgcataatattgttgaacaacacggtggtacaattcaggtcgcaagccaggagggaaaaggcagtacgttcaccctctggcttccggtcaatattacgcgtaaggacccacaaggatgacgcacgataatatcgatattctggtggtggatgatgacattagccactgcactattttgcaggctttactgcgcggctggggctataacgtcgcgctggcgaacagcgggcgacaggcgttggagcaggtgcgggaacaggtttttgatcttgtgctttgcgatgtgcgaatggcggagatggacggcatcgccacgctgaaagagatcaaagcgttaaacccggcaattccggtgctgattatgactgcgtactccagcgtcgagacggcggtagaggcactgaaaactggggcgctggattatctcatcaagccgctggatttcgataacctacaggcgacgctggaaaaagcgctcgcgcatacgcacagtattgatgctgaaacacctgcggtgactgccagccagttcggtatggtcggtaaaagcccggcgatgcaacacctgctcagtgaaatcgccctcgtcgcgccaagcgaagccacggtactgatccacggcgattccggcaccggtaaagagctggtcgccagggcgattcacgccagtagcgcacgtagcgaaaaaccgctggtaacgctcaactgtgcggcactcaacgaatccttgctggaatctgaattgttcggtcacgaaaaaggggcgtttactggagccgataaacgccgggaagggcgctttgttgaggcggacggcggcacgctgtttctcgatgaaattggcgatatcagcccgatgatgcaggtgcgtctgctgcgtgcgattcaggagcgcgaagttcagcgtgtcggtagcaaccagattatcagcgttgatgtccggctgattgcggcgacccatcgcgatcttgccgcagaggtgaatgccgggcgttttcgccaggatctctactatcgcctgaatgtggtggcgattgaagtaccaagcctgcggcaacggcgggaagatatccctctgctggctggccattttctgcagcgctttgccgagcgtaatcgcaaggcggtaaaaggttttacgccccaggcgatggatctgttgattcattacgactggccgggaaatattcgtgagctggaaaacgcggtggaacgggcagtggtgctgctgaccggggaatatatttccgaacgcgagctgccgctggcgattgccagtacgccgatcccgctgggacaaagtcaggatattcagccgttggtggaagtggaaaaagaggtgattctggcggcgctggagaaaacgggcggcaacaaaaccgaagccgcccgtcagttagggatcacgcgcaaaacgctattggcaaaactgagccgttaattctgctcgcgttcgatagcgcgccagccgatatctttccggcagaagcagtcgtcccagtggatatcggtcattaaggcataggcgcgtttctgcgcttctgccacggtatgacccagcgcggtgacgcacagtacgcgcccgccgttggtcactacctgctcgtcatccgccagttttgtgcccgcgtggaacactttgccgcctgccacttcttccagcggcaggccgtggatcacgtcaccggtgcggtaatcacccggatatccacccgcagccatcaccacgccgagagaagcgcgttcatcccactcggacgttttctcgtccagtttgctttcacaggccgccaggcagagctcaaccagatcggacttcatgcgcagcataatcggctgggtttccggatcgccaaagcggcagttaaattcaataaccttcggattgccctgtttgtcgatcatcaggcccgcgtagagaaaaccggtgtaggtgttgccttccgccgccatgcctttcacggttggccagataatacgttccatggtgcgctgatgaacgtcatcggttactaccggcgcgggggagtaagcgcccatcccgccggtgtttggtccggtatctttatcgcctacgcgtttgtgatcctggctggtagccatcggcagcacatgctcgccgtccaccatcacgataaagctcgcttcttcgccatcgaggaactcttcgataacgatgcgatgacccgcgtcgccaaaagcgttgcccgccagcatatcgtgaacagccgcttccgcttcttccagcgtcatcgccacgataacgcctttcccggcagccagaccgtccgctttaatgacgattggcgcgcctttctcacgcagatacgccagcgcaggttctacctcggtgaagttctggtattccgccgtagggatcttatggcgggccaggaaatctttggtaaacgctttactgccttccagttgggccgcacctgcggttgggccgaagattttcagcccggcggcgcggaaggtatcgaccacgcctttcaccagcggcgcttccgggccgacgatggtcagatcaatcttttcgttttgtgcgaaatccaacagcgccgggatatcggtcacgccaatagcaacgttttgcagcgcgggttccagtgcagtgcctgcattacccggagcaacaaaaacagtctcaaccagcgggctctgggccgctttccaggccagcgcgtgctcgcgcccgccgttaccaatcactaatactttcatctattgctccattaatggcggaagtggcgcatgtcggtgaagagcatcgcaataccgtgctcgtcggcggcggcaatcacttcgtcatcacggatagaaccgccaggctggattacgcaggtcacgcccgcagcggcggcggcatcaataccgtcgcggaacgggaagaacgcgtcagaagccatgctggaacctttcacttccaggccttcatcggccgctttaataccggcgatttttgcggagtacacgcggctcatctggcccgcgccaatgccgatagtcatattgtttttggcatagacgatagcgttggatttcacaaacttcgccaccttccagcagaacagcgcatcacgcagttcctgttcgctcggctgacgtttggtcaccacgcgcagttcttccgcaccgaccatccccaggtcacgatcctgaaccagcagaccgccgttcacgcgtttgaaatcgaggcccggaacacgctcgccccactgaccgcaggtcagaacgcgtacgttctgtttggcggcggtgattttcagggcttcttcgctggcggacggcgcaataatcacttcgacaaactgacgagaaatgatggcctgtgcggtttccgcatccagctcgcggttaaaggcaatgatgccgccgaatgcggaggttgggtcggttttgtacgcgcgatcgtaagcatcaagaatggaattgccgatagccacgccgcaagggttggcgtgcttcacaatcacacatgccggctcggcgaactctttcacgcactccagcgccgcatcggtatcggcgatgttgttataagagagggctttaccctgaacctgggttgcggtagcaacggaggcttctttcacattctcttctatatagaaggcagcctgctggtggctgttctcgccgtaacgcatatccagcttcttaatgaagttcaggttcagcgtgcgtgggaagcgaccggcggcttctttgctttcaccgtggtaagccggaaccatgctgccgaagtagttggcaatcatgctgtcgtaggcggcagtgtgttcgaaggctttgatggcgaggtcgaaacgggttgcaagcgtcaggcttccttcgttgtcatccatctctttaataatggcgtcatagtcgctgctcttcaccacgattgcgacatctttatggttcttggcggcggagcgcaccatcgttgggccgccgatatcgatgttctcaaccgcatcttccaggctgcaaccttcacgggccacggtctgggcgaacggatacaggttaacaaccaccatatcgataggctggatctgatgttcttccataatggcatcgtcctggccgcgacggcccagaatgccaccatgtactttcggatgcagggtcttcacgcgtccatccatcatctccgggaaaccggtgtaatcggaaacttcggttaccggcagacctttttctgctaacagacgggcagtgccccctgtagacagcagctccacaccgcgtgcggaaagtgcctgggcgaattcgacgataccggctttgtcagaaacactgagcagagcgcggcggactggacgacgttgttgcatggtaaatcccctggatttgactattacagagagcgttagctgaatttttcgcgaaaaactcagctaacgcccctaacggggcatccttatttttcgcccgcattgtaacgaaaacgtttgcgcaacgctcgcgaatttttctctttcaatggtgatcacaattttgactgtggttaccgtgggcaaaatacagaaattacattgatgattgtggataactctgtgcgtaaaaaggtataaagcgggcttttgctggggaatgcagcagtcagtcatttttctgcaatttttctattgcggcctgcggagaactccctataatgcgcctccatcgacacggcggatgtgaatcacttcacacaaacagccggttcggttgaagagaaaaatcctgaaattcagggttgactctgaaagaggaaagcgtaatatacgccacctcgcgacagtgcgctaaagcgcgtcgcaactgctctttaacaatttatcagacaatctgtgtgggcactcgaagatacggattcttaacgtcgcaagacgaaaaatgaataccaagtctcaagagtgaacacgtaattcattacgaagtttaattctttgagcatcaaacttttaaattgaagagtttgatcatggctcagattgaacgctggcggcaggcctaacacatgcaagtcgaacggtaacaggaagaagcttgcttctttgctgacgagtggcggacgggtgagtaatgtctgggaaactgcctgatggagggggataactactggaaacggtagctaataccgcataacgtcgcaagaccaaagagggggaccttcgggcctcttgccatcggatgtgcccagatgggattagctagtaggtggggtaacggctcacctaggcgacgatccctagctggtctgagaggatgaccagccacactggaactgagacacggtccagactcctacgggaggcagcagtggggaatattgcacaatgggcgcaagcctgatgcagccatgccgcgtgtatgaagaaggccttcgggttgtaaagtactttcagcggggaggaagggagtaaagttaatacctttgctcattgacgttacccgcagaagaagcaccggctaactccgtgccagcagccgcggtaatacggagggtgcaagcgttaatcggaattactgggcgtaaagcgcacgcaggcggtttgttaagtcagatgtgaaatccccgggctcaacctgggaactgcatctgatactggcaagcttgagtctcgtagaggggggtagaattccaggtgtagcggtgaaatgcgtagagatctggaggaataccggtggcgaaggcggccccctggacgaagactgacgctcaggtgcgaaagcgtggggagcaaacaggattagataccctggtagtccacgccgtaaacgatgtcgacttggaggttgtgcccttgaggcgtggcttccggagctaacgcgttaagtcgaccgcctggggagtacggccgcaaggttaaaactcaaatgaattgacgggggcccgcacaagcggtggagcatgtggtttaattcgatgcaacgcgaagaaccttacctggtcttgacatccacggaagttttcagagatgagaatgtgccttcgggaaccgtgagacaggtgctgcatggctgtcgtcagctcgtgttgtgaaatgttgggttaagtcccgcaacgagcgcaacccttatcctttgttgccagcggtccggccgggaactcaaaggagactgccagtgataaactggaggaaggtggggatgacgtcaagtcatcatggcccttacgaccagggctacacacgtgctacaatggcgcatacaaagagaagcgacctcgcgagagcaagcggacctcataaagtgcgtcgtagtccggattggagtctgcaactcgactccatgaagtcggaatcgctagtaatcgtggatcagaatgccacggtgaatacgttcccgggccttgtacacaccgcccgtcacaccatgggagtgggttgcaaaagaagtaggtagcttaaccttcgggagggcgcttaccactttgtgattcatgactggggtgaagtcgtaacaaggtaaccgtaggggaacctgcggttggatcacctccttaccttaaagaagcgttctttgcagtgctcacacagattgtctgatagaaagtgaaaagcaaggcgtcttgcgaagcagactgatacgtccccttcgtctagaggcccaggacaccgccctttcacggcggtaacaggggttcgaatcccctaggggacgccacttgctggtttgtgagtgaaagtcacctgccttaatatctcaaaactcatcttcgggtgatgtttgagatatttgctctttaaaaatctggatcaagctgaaaattgaaacactgaacaacgaaagttgttcgtgagtctctcaaattttcgcaacacgatgatgaatcgtaagaaacatcttcgggttgtgaggttaagcgactaagcgtacacggtggatgccctggcagtcagaggcgatgaaggacgtgctaatctgcgataagcgtcggtaaggtgatatgaaccgttataaccggcgatttccgaatggggaaacccagtgtgtttcgacacactatcattaactgaatccataggttaatgaggcgaaccgggggaactgaaacatctaagtaccccgaggaaaagaaatcaaccgagattcccccagtagcggcgagcgaacggggagcagcccagagcctgaatcagtgtgtgtgttagtggaagcgtctggaaaggcgcgcgatacagggtgacagccccgtacacaaaaatgcacatgctgtgagctcgatgagtagggcgggacacgtggtatcctgtctgaatatggggggaccatcctccaaggctaaatactcctgactgaccgatagtgaaccagtaccgtgagggaaaggcgaaaagaaccccggcgaggggagtgaaaaagaacctgaaaccgtgtacgtacaagcagtgggagcacgcttaggcgtgtgactgcgtaccttttgtataatgggtcagcgacttatattctgtagcaaggttaaccgaataggggagccgaagggaaaccgagtcttaactgggcgttaagttgcagggtatagacccgaaacccggtgatctagccatgggcaggttgaaggttgggtaacactaactggaggaccgaaccgactaatgttgaaaaattagcggatgacttgtggctgggggtgaaaggccaatcaaaccgggagatagctggttctccccgaaagctatttaggtagcgcctcgtgaattcatctccgggggtagagcactgtttcggcaagggggtcatcccgacttaccaacccgatgcaaactgcgaataccggagaatgttatcacgggagacacacggcgggtgctaacgtccgtcgtgaagagggaaacaacccagaccgccagctaaggtcccaaagtcatggttaagtgggaaacgatgtgggaaggcccagacagccaggatgttggcttagaagcagccatcatttaaagaaagcgtaatagctcactggtcgagtcggcctgcgcggaagatgtaacggggctaaaccatgcaccgaagctgcggcagcgacgcttatgcgttgttgggtaggggagcgttctgtaagcctgcgaaggtgtgctgtgaggcatgctggaggtatcagaagtgcgaatgctgacataagtaacgataaagcgggtgaaaagcccgctcgccggaagaccaagggttcctgtccaacgttaatcggggcagggtgagtcgacccctaaggcgaggccgaaaggcgtagtcgatgggaaacaggttaatattcctgtacttggtgttactgcgaaggggggacggagaaggctatgttggccgggcgacggttgtcccggtttaagcgtgtaggctggttttccaggcaaatccggaaaatcaaggctgaggcgtgatgacgaggcactacggtgctgaagcaacaaatgccctgcttccaggaaaagcctctaagcatcaggtaacatcaaatcgtaccccaaaccgacacaggtggtcaggtagagaataccaaggcgcttgagagaactcgggtgaaggaactaggcaaaatggtgccgtaacttcgggagaaggcacgctgatatgtaggtgaggtccctcgcggatggagctgaaatcagtcgaagataccagctggctgcaactgtttattaaaaacacagcactgtgcaaacacgaaagtggacgtatacggtgtgacgcctgcccggtgccggaaggttaattgatggggttagcgcaagcgaagctcttgatcgaagccccggtaaacggcggccgtaactataacggtcctaaggtagcgaaattccttgtcgggtaagttccgacctgcacgaatggcgtaatgatggccaggctgtctccacccgagactcagtgaaattgaactcgctgtgaagatgcagtgtacccgcggcaagacggaaagaccccgtgaacctttactatagcttgacactgaacattgagccttgatgtgtaggataggtgggaggctttgaagtgtggacgccagtctgcatggagccgaccttgaaataccaccctttaatgtttgatgttctaacgttgacccgtaatccgggttgcggacagtgtctggtgggtagtttgactggggcggtctcctcctaaagagtaacggaggagcacgaaggttggctaatcctggtcggacatcaggaggttagtgcaatggcataagccagcttgactgcgagcgtgacggcgcgagcaggtgcgaaagcaggtcatagtgatccggtggttctgaatggaagggccatcgctcaacggataaaaggtactccggggataacaggctgataccgcccaagagttcatatcgacggcggtgtttggcacctcgatgtcggctcatcacatcctggggctgaagtaggtcccaagggtatggctgttcgccatttaaagtggtacgcgagctgggtttagaacgtcgtgagacagttcggtccctatctgccgtgggcgctggagaactgaggggggctgctcctagtacgagaggaccggagtggacgcatcactggtgttcgggttgtcatgccaatggcactgcccggtagctaaatgcggaagagataagtgctgaaagcatctaagcacgaaacttgccccgagatgagttctccctgactccttgagagtcctgaaggaacgttgaagacgacgacgttgataggccgggtgtgtaagcgcagcgatgcgttgagctaaccggtactaatgaaccgtgaggcttaaccttacaacgccgaaggtgttttggcggattgagagaagattttcagcctgatacagattaaatcagaacgcagaagcggtctgataaaacagaatttgcctggcggcagtagcgcggtggtcccacctgaccccatgccgaactcagaagtgaaacgccgtagcgccgatggtagtgtggggtctccccatgcgagagtagggaactgccaggcatcaaattagaaaaaccccggtccataaggccggggttttttgcatatcaattatttgcatgatgaagggaatctcatgagtgttctgtatatccaaattcgtcgtaatcaaattactgttcgcgatcttgaaagcaaacgtgaagtgagtggagacgctgccttcagtaaccagcgcctgttaatcgccaatttctttgttgcagaaaaagttctgcaagatcttgttctgcaactccacccacgtagtacctggcattcttttttgccagcaaaacgtatggatattgttgtgagcgcactggaaatgaatgagggcggtttgagtcaggttgaggaacgcattctccatgaagtggtcgctggggcaacgttaatgaaatatcgccagttccacatccatgcgcaaagtgcggtactcagtgatagtgcggtcatggcaatgcttaagcagaaataatcgtgtcaccattggtgggtactaaacctgaagttcagcccaccgggatgagaaaaaatcgcttacgcccccacatacgccagattcagcaacggatacggtttccccaaatcgtccacctcagagcgtcccgtaaccttaaaacccaccttcttatagaacccaaccgcctgctcattttgctcattaacgttggttgtcagttccggtgccatgctgagcgcatgctccaccagcacccgacctacgccgcagccgcgcacatcaggatcgataaacagcgcatccatatgctgcccacttagcaacataaatccaaccggctgatcccgctcattaaccgcgacccacaacggcgcttccggcaggaaggaacgaactaggtcctccagctcggtccgatactctgcacttagaaaatcgtgagtggcatcgacagaacgacaccaaatcgcaacgagttcctccccttcctcatgccgactgcggcgaatactaataaccattttctctccttttagtcattcttatattctaacgtagtcttttccttgaaactttctcaccttcaacatgcaggctcgacattggcaaattttctggttatcttcagctatctggatgtctaaacgtataagcgtatgtagtgaggtaatcaggttatgccgattcgtgtgccggacgagctacccgccgtcaatttcttgcgtgaagaaaacgtctttgtgatgacaacttctcgtgcgtctggtcaggaaattcgtccacttaaggttctgatccttaacctgatgccgaagaagattgaaactgaaaatcagtttctgcgcctgcttagtaacagtcctttgcaggtcgatattcagctgttgcgcatcgattcccgtgaaagccgcaacacgcccgcagagcatctgaacaacttctactgtaactttgaagatattcaggatcagaactttgacggtttgattgtaactggtgcgccgctgggcctggtggagtttaatgatgtcgcttactggccgcagatcaaacaggtgctggagtggagcaaagatcacgtcaccagcacgctgtttgtctgctgggcggtacaggccgcgctcaatatcctctacggcattcctaagcaaactcgcaccgaaaaactctctggcgtttacgagcatcatattctccatcctcatgcgcttctgacgcgtggctttgatgatagtttcctggcaccgcatagccgctatgctgactttccggcagcgttgattcgtgattacaccgatctggaaattctggcagagacggaagaaggggatgcatatctgtttgccagtaaagataagcgcattgcctttgtgacgggccatcccgaatatgatgcgcaaacgctggcgcaggaatttttccgcgatgtggaagccggactagacccggatgtaccgtataactatttcccgcacaatgatccgcaaaatacaccgcgagcgagctggcgtagtcacggtaatttactgtttaccaactggctcaactattacgtctaccagatcacgccatacgatctacggcacatgaatccaacgctggattaatcttctgtgatagtcgatcgttaagcgattcagcaccttacctcaggcaccttcgggtgccttttttatttccgaaacgtacctcagcaggtgaataaattttattcatattgttatcaacaagttatcaagtatttttaattaaaatggaaattgtttttgattttgcattttaaatgagtagtcttagttgtgctgaacgaaaagagcacaacgatccttcgttcacagtggggaagttttcggatccatgacgaggagctgcacgatgactgaacaggcaacaacaaccgatgaactggctttcacaaggccgtatggcgagcaggagaagcaaattcttactgccgaagcggtagaatttctgactgagctggtgacgcattttacgccacaacgcaataaacttctggcagcgcgcattcagcagcagcaagatattgataacggaacgttgcctgattttattagcgaaacagcttccattcgcgatgctgattggaaaattcgcgggattcctgcggacttagaagaccgccgcgtagagataactggcccggtagagcgcaagatggtgatcaacgcgctcaacgccaatgtgaaagtctttatggccgatttcgaagatagtctggcaccagactggaacaaagtgatcgacgggcaaattaacctgcgtgatgcggttaacggcaccatcagttacaccaatgaagcaggcaaaatttaccagctcaagcccaatccagcggttttgatttgtcgggtacgcggtctgcacttgccggaaaaacatgtcacctggcgtggtgaggcaatccccggcagcctgtttgattttgcgctctatttcttccacaactatcaggcactgttggcaaagggcagtggtccctatttctatctgccgaaaacccagtcctggcaggaagcggcctggtggagcgaagtcttcagctatgcagaagatcgctttaatctgccgcgcggcaccatcaaggcgacgttgctgattgaaacgctgcccgccgtgttccagatggatgaaatccttcacgcgctgcgtgaccatattgttggtctgaactgcggtcgttgggattacatcttcagctatatcaaaacgttgaaaaactatcccgatcgcgtcctgccagacagacaggcagtgacgatggataaaccattcctgaatgcttacagtcgcctgttgattaaaacctgccataaacgcggtgcttttgcgatgggcggcatggcggcgtttattccgagcaaagatgaagagcacaataaccaggtgctcaacaaagtaaaagcggataaaagcctggaagccaataacggtcacgatggcacatggatcgctcacccaggccttgcggacacggcaatggcggtattcaacgacattctcggctcccgtaaaaatcagcttgaagtgatgcgcgaacaagacgcgccgattactgccgatcagctgctggcaccttgtgatggtgaacgcaccgaagaaggtatgcgcgccaacattcgcgtggctgtgcagtacatcgaagcgtggatctctggcaacggctgtgtgccgatttatggcctgatggaagatgcggcgacggctgaaatttcccgtaccagcatctggcagtggatccatcatcaaaaaacgttgagcaatggcaaaccggtgaccaaagccttgttccgccagatgctgggcgaagagatgaaagtcattgccagcgaactgggcgaagaacgtttctcccaggggcgttttgacgatgccgcacgcttgatggaacagatcaccacttccgatgagttaattgatttcctgaccctgccaggctaccgcctgttagcgtaaaccaccacataactatggagcatctgcacatgaaaacccgtacacaacaaattgaagaattacagaaagagtggactcaaccgcgttgggaaggcattactcgcccatacagtgcggaagatgtggtgaaattacgcggtagtgtcaatcctgaatgcacgctggcgcaactgggcgcagcgaaaatgtggcgtctgctgcacggtgagagcaaaaaaggctacatcaacagcctcggcgcactgactggcggtcaggcgctgcaacaggcgaaagcgggtattgaagcagtctatctgagcggatggcaggtagcggcggacgctaacctggcggccagcatgtatccggatcagagcctctatccggcaaacagcgtgccagctgtggtggagcggatcaacaacaccttccgtcgtgccgatcagatccaatggtccgcgggcattgagccgggcgatccgcgctatgtcgattacttcctgccgatcgttgccgatgcggaagccggttttggcggtgtcctgaatgcctttgaactgatgaaagcgatgattgaagccggtgcagcggcagttcacttcgaagatcagctggcgagtgtgaagaaatgcggtcacatgggcggcaaagttttagtgccaactcaggaagctattcagaaactggtcgcggcgcgtctggcagctgacgtgacgggcgttccaaccctgctggttgcccgtaccgatgctgatgcggcggatctgatcacctccgattgcgacccgtatgacagcgaatttattaccggcgagcgtaccagtgaaggcttcttccgtactcatgcgggcattgagcaagcgatcagccgtggcctggcgtatgcgccatatgctgacctggtctggtgtgaaacctccacgccggatctggaactggcgcgtcgctttgcacaagctatccacgcgaaatatccgggcaaactgctggcttataactgcagcccgagcttcaactggcagaaaaacctcgacgacaaaactattgccagcttccagcagcagctgagcgatatgggctacaagttccagttcatcaccctggcaggtatccacagcatgtggttcaacatgtttgacctggcaaacgcctatgcccagggcgagggtatgaagcactacgttgagaaagtgcagcagccggaatttgccgccgcgaaagatggctataccttcgtatctcaccagcaggaagtgggtacaggttacttcgataaagtgacgactattattcagggcggcacgtctagtgtcaccgcgctgaccggctccactgaagaaagccagttctaagcaacaacaaccgttgctgactgtaggccggataaggcgttcacgccgcatccggcaatcggtgcacgatgcctgatgcgacgcttgcgcgtcttatcatgcctacagccgttgccgaacgtaggctggataaggcgtttacgccgcatccggcaattctctgctcctgatgagggcgctaaatgccgcgtggcctggaattattgattgctcaaaccattttgcaaggcttcgatgctcagtatggtcgattcctcgaagtgacctccggtgcgcagcagcgtttcgaacaggccgactggcatgctgtccagcaggcgatgaaaaaccgtatccatctttacgatcatcacgttggtctggtcgtggagcaactgcgctgcattactaacggccaaagtacggacgcggcatttttactacgtgttaaagagcattacacccggctgttgccggattacccgcgcttcgagattgcggagagcttttttaactccgtgtactgtcggttatttgaccaccgcagccttactcccgagcggctttttatctttagctctcagccagagcgccgctttcgtaccattccccgcccgctggcgaaagactttcaccccgatcacggctgggaatctctactgatgcgcgttatcagcgacctaccgctgcgcctgcgctggcagaataaaagccgtgacatccattacattattcgccatctgacggaaacgctggggacagacaacctcgcggaaagtcatttacaggtggcgaacgaactgttttaccgcaataaagccgcctggctggtaggcaaactgatcacaccttccggcacattgccatttttgctgccgatccaccagacggacgacggcgagttatttattgatacctgcctgacgacgaccgccgaagcgagcattgtttttggctttgcgcgttcttattttatggtttatgcgccgctgcccgcagcgctggtcgagtggctacgggaaattctgccaggtaaaaccaccgctgaattgtatatggctatcggctgccagaagcacgccaaaaccgaaagctaccgcgaatatctcgtttatctacagggctgtaatgagcagttcattgaagcgccgggtattcgtggaatggtgatgttggtgtttacgctgccgggctttgatcgggtattcaaagtcatcaaagacaggttcgcgccgcagaaagagatgtctgccgctcacgttcgtgcctgctatcaactggtgaaagagcacgatcgcgtgggccgaatggcggacacccaggagtttgaaaactttgtgctggagaagcggcatatttccccggcattaatggaattactgcttcaggaagcagcggaaaaaatcaccgatctcggcgaacaaattgtgattcgccatctttatattgagcggcggatggtgccgctcaatatctggctggaacaagtggaaggtcagcagttgcgcgacgccattgaagaatacggtaacgctattcgccagcttgccgctgctaacattttccctggcgacatgctgtttaaaaacttcggtgtcacccgtcacgggcgtgtggttttttatgattacgatgaaatttgctacatgacggaagtgaatttccgcgacatcccgccgccgcgctatccggaagacgaacttgccagcgaaccgtggtacagcgtcagcccgggcgatgttttcccggaagagtttcgccactggctatgcgccgacccgcgtattggtccgctgtttgaagagatgcacgccgacctgttccgcgctgattactggcgcgcactacaaaaccgcatacgtgaagggcatgtggaagatgtttatgcgtatcggcgcaggcaaagatttagcgtacggtatggggagatgcttttttgagtaaagcttccatataatttttctccgcaatgtatcgagggttatccgtaaagccaaagctttcagccatcttatttaatgtattaaggattaattcagcaataacccggtgaccaaattcaaaagccaactcaaaggcagagtatttttgtggggctttgtgttgccaaaaatccataatatcttcagcggtaaatccaaacaggcgtgcatggtcagataaagcaagataaaccgtctctacaacattttgttgtttatgctgtatcgcactaaacaaaccgggatattcattagaattatttgccaggaggaggggcttcatattttttttatcgaatttaaacgtattaaacagagtgggtaatgcgttaaaaatagtattaataacgttcatgtgtccgcgctgcatggccataaacaaacccgtgtcgcgcgcaagacttttagcggtcagaagatctacaatatcggaagcactaatgttaatttcctgggctaggctgggcaatgcttcaagaataactttcacgatatcgctatgtccattttgcatcgccagatatagtcctgggcaaccataaaaatcctttgccttcaggagatcgagtacctgttctttagtcaaatgacatgtgcgaattaacaaaggtaacgcgttcaaaacaattttcagcatgtcggcatcaccattcgccataacatggtataaaacatggctggacgttctatttttggcactcaggaatttatacacttgttcgttatctaaatgatgtgttgcggccagtttaggtaaggcgttcagaatgctggttacaacatttttatccttacgacttatcgctaaaaataatccagaaaaaccatttttatcttttgcctccagaatatgcatgagattttttttgctgagtaatccttcatatcctgtttcactcaaactattgaaaatagtctcaacgatatccgcattaccataatttatagccaaatataaacctggcaggttaatactattataggcagtcaacatttctgttctatgtagttctggcattttctggagttgaatcatcagttgcgtaagttggtgattctgaccaattgccattagcaaattcatcgttgcaggacttaatggaggggttatttcatccacagatccttttaacatcaatagctgttctttcggaagtgctggaattattgcaacagattgattaataacatgatcattactccatttcaggaggctataatctacattcataaaatccatcagagaatagtgtttaatattctctttgctttcgctcataattcttattttatcgttagttacattaggatcataaacgctaaccacgtaatgggtacatccttcagttgtgttctttattcttagccggaccgtcaaagcatggttatccaccagtaatatggctgccataacactgatgccattactttccatcttgtcaaaatatgctttcataactagcccgaaatcaccgcaggcagcaacgcaacgcccctcaggacggctggaaaccaacgccaaagtctggtttttgcattttttgttgaagtgcgtgagaaatttttcagcactagagtaatcatcttgatggggtttgtaatcaacattctgataaatatcattaatatattgtgcagcaatgtgtcggcatactatacggttttggggtcgccccggaaaataacattgaccattaagtttaattcttgggaattctttttcttttctatcactttttaggtttaattcttgtttatcaagagtgtcactgcgttgaggtaaaatttccattaggtatttttcaaatattggggcaatggtttgagtaagtgtcgtgttttcgtttttattaattatcgtaatttctttcttatcagcttgtaagacggacgtggaaaatttaatgacaaaatccttgttgctaaagatatgacgaccattttgtctacagttctcactgaagctttttaatagaggcgtcgccagctccttgccagaaaatttatcctcgagttctttataaaacaattcactcagggtttggtgttcatttgtctgggctgtattattaatatttgcagagaaagaactacgaggaatacgagtaatcatttaaatatctcattgtttattgatgtcttgaattttaactatcagaacagtgaaaaaatttaatatgattacaactaaagaaatatcataaatcgctcaatctcataatgcagccgtaaaagtttcggtggaatgagatcttgcgattttgttaataattaagtggtttgatgtttaaaaataatgctgagttaataaaagtgtgtgaagtgtatgacattaagttattttggcgtcaatgcgattaacagacacccttattctattgccactcaggtatgatgggcagaatattgcctctgcccgccagaaaaagtcagcgcattccaccgtacgccagcgtcacttccttcgccgctttaatcaccatcgcgccaaactcggtcacgcggtcatcggtaatacgactaatcggtccggaaatagaaattgcggcaaacggttcacggtgctcatcgaaaatacacgctgcaaggcaacgtagccccagtgcatgttcctcatcgtcaaaactataaccccgtttgcgcgtttgggcgagatcttcttttaaatgcacaggagacaccagcgttgcgtgggtataggcatgtaaccctttgcggtgcagcagcttcgtcacctgttcttcgctcagttgggctaaaaaggctttacccgcaccggaagcgtgcatcggcaatttaccgccgataggcgcggacattcgcatcagatgcgtacactgtacctggtcgataataatcgcttcgtgatcgctttgatcaagcaccgccatattgaccgtttcgccagactcttccattagattgcgcaggatagggtgaacaatcgctaacaaattacggctctggagaaagctgctgccgaccataaaggcatgtgcgccgattgcccaatgtcccagttcgccaacctgacgcacgaaaccctgctgttgcatcgtggttagcaggcggtgggtcgtggaattgggtaacccggcttgttgcgccagttccgtgagtgccacactgccattggattcggcaatccactccagtaatttcaggccacgcgttaaagactgaacctgtccagtcgctggtgcggtggcaacggcgggttttctgccgcgtttcgcgggaatgggtgcgaccatgacagtctcttttttctgtatcgtggaaatcattttcatttttattgttagctaatgcaatagttactgaactgatccgatgagttaatgttgaacaaatctcatgttgcgtggtggtcgcttttaccacagatgcgtttatgccagtatggtttgttgaatttttattaaatctgggttgagcgtgtcgggagcaagtgtgagcagcaaagtggaacaactgcgtgcgcagttaaatgaacgtattctggtgctggacggcggtatgggcaccatgatccagagttatcgactgaacgaagccgattttcgtggtgaacgctttgccgactggccatgcgacctcaaaggcaacaacgacctgctggtactcagtaaaccggaagtgatcgccgctatccacaacgcctactttgaagcgggcgcggatatcatcgaaaccaacaccttcaactccacgaccattgcgatggcggattaccagatggaatccctgagcgcggaaatcaactttgcggcggcgaaactggcgcgagcttgtgctgacgagtggaccgcgcgcacgccagagaaaccgcgctacgttgccggtgttctcggcccgaccaaccgcacggcgtctatttctccggacgtcaacgatccggcatttcgtaatatcacttttgacgggctggtggcggcttatcgagagtccaccaaagcgctggtggaaggtggcgcggatctgatcctgattgaaaccgttttcgacacccttaacgccaaagcggcggtatttgcggtgaaaacggagtttgaagcgctgggcgttgagctgccgattatgatctccggcaccatcaccgacgcctccgggcgcacgctctccgggcagaccaccgaagcattttacaacagtttgcgccacgccgaagctctgacctttggcctgaactgtgcgctggggcccgatgaactgcgccagtacgtgcaggagctgagtcggattgcggaatgctacgtcaccgcgcacccgaacgccgggctacccaacgcctttggtgagtacgatctcgacgccgacacgatggcaaaacagatacgtgaatgggcgcaagcgggttttctcaatatcgtcggcggctgctgtggcaccacgccacaacatattgcagcgatgagtcgtgcagtagaaggattagcgccgcgcaaactgccggaaattcccgtagcctgccgtttgtccggcctggagccgctgaacattggcgaagatagcctgtttgtgaacgtgggtgaacgcaccaacgtcaccggttccgctaagttcaagcgcctgatcaaagaagagaaatacagcgaggcgctggatgtcgcgcgtcaacaggtggaaaacggcgcgcagattatcgatatcaacatggatgaagggatgctcgatgccgaagcggcgatggtgcgttttctcaatctgattgccggtgaaccggatatcgctcgcgtgccgattatgatcgactccagtaaatgggacgtcattgaaaaaggtctgaagtgtatccagggcaaaggcattgttaactctatcagcatgaaagagggcgtcgatgcctttatccatcacgcgaaattgttgcgtcgctacggtgcggcagtggtggtaatggcctttgacgaacagggacaggccgatactcgcgcacggaaaatcgagatttgccgtcgggcgtacaaaatcctcaccgaagaggttggcttcccgccagaagatatcatcttcgacccaaacatcttcgcggtcgcaactggcattgaagagcacaacaactacgcgcaggactttatcggcgcgtgtgaagacatcaaacgcgaactgccgcacgcgctgatttccggcggcgtatctaacgtttctttcagcttccgtggcaacgatccggtgcgcgaagccattcacgcagtgttcctctactacgctattcgcaatggcatggatatggggatcgtcaacgccgggcaactggcgatttacgacgacctacccgctgaactgcgcgacgcggtggaagatgtgattcttaatcgtcgcgacgatggcaccgagcgtttactggagcttgccgagaaatatcgcggcagcaaaaccgacgacaccgccaacgcccagcaggcggagtggcgcagctgggaagtgaataaacgtctggaatacagcctggtcaaaggcattaccgagtttatcgagcaggataccgaagaagcccgccagcaggctacgcgcccgattgaagtgattgaaggcccgttgatggacggcatgaatgtggtcggcgacctgtttggcgaagggaaaatgttcctgccacaggtggtcaaaagcgcgcgcgtcatgaaacaggcggtggcctacctcgaaccgtttattgaagccagcaaagagcagggcaaaaccaacggcaagatggtgatcgccaccgtgaagggcgacgtccacgacatcggtaaaaatatcgttggtgtggtgctgcaatgtaacaactacgaaattgtcgatctcggcgttatggtgcctgcggaaaaaattctccgtaccgctaaagaagtgaatgctgatctgattggccttagcgggcttatcacgccgagcctggacgagatggttaacgtggcgaaagagatggagcgtcagggcttcactattccgttactgattggcggcgcgacgaccagtaaagcgcacacggcggtgaaaatcgagcagaactacagcggcccgacggtgtatgtgcagaatgccagccgtaccgttggtgtggtggcggcgctgctttccgatacccagcgtgatgattttgtcgctcgtacccgcaaggagtacgaaaccgtacgtattcagcacgggcgcaagaaaccgcgcacaccaccggtcacgctggaagcggcgcgcgataacgatttcgcttttgactggcaggcttacacgccgccggtggcgcaccgtctcggcgtgcaggaagtcgaagccagcatcgaaacgctgcgtaattacatcgactggacaccgttctttatgacctggagcctggccgggaagtatccgcgcattctggaagatgaagtggtgggcgttgaggcgcagcggctgtttaaagacgccaacgacatgctggataaattaagcgccgagaaaacgctgaatccgcgtggcgtggtgggcctgttcccggcaaaccgtgtgggcgatgacattgaaatctaccgtgacgaaacgcgtacccatgtgatcaacgtcagccaccatctgcgtcaacagaccgaaaaaacaggcttcgctaactactgtctcgctgacttcgttgcgccgaagctttctggtaaagcagattacatcggcgcatttgccgtgactggcgggctggaagaggacgcactggctgatgcctttgaagcgcagcacgatgattacaacaaaatcatggtgaaagcgcttgccgaccgtttagccgaagcctttgcggagtatctccatgagcgtgtgcgtaaagtctactggggctatgcgccgaacgagaacctcagcaacgaagagctgatccgcgaaaactaccagggcatccgtccggcaccgggctatccggcctgcccggaacatacggaaaaagccaccatctgggagctgctggaagtggaaaaacacactggcatgaaactcacagaatctttcgccatgtggcccggtgcaagcgttagcggttggtacttcagccacccggacagcaagtactacgctgtagcacaaattcagcgcgatcaggttgaagattatgcccgccgtaaaggtatgagcgttaccgaagttgagcgctggctggcaccgaatctggggtatgacgcggactgattcacaaatctgtcacttttccttacaacaaacagggcgctcaatgagtgccctgtctctttattaatatgaaacacttatactggaaacaggctggaataatcttagccggaaaaacgaatgtcaaaaggcacagtaaagatgccagtcagcgtgtttccggtcctttggtcattcaattgcttcaggaacatataacgataaggagaacctgaactcgtgttaacgctgcttcacctgctttctgccgtcgccctgctggtctgggggactcatattgttcgaaccggcgtaatgcgcgtcttcggcgcgcgtttgcgtactgtccttagccggagcgtcgaaaaaaagccgctcgccttttgcgcggggatcggcgttaccgcactggtacagagcagtaatgccaccaccatgctggtgaccagctttgtcgctcaggatctggtagccctcgcaccggctctggtcattgtgctgggtgcagatgtcgggacggcgctaatggcgcgtattctcaccttcgacttatcctggctgagtccgttacttatttttatcggcgtgatttttttcctcggacgcaaacagagtcgcgccgggcaactgggccgcgtcggtattggtcttgggctgattttgctagcgctggagttgattgtgcaggccgtaacgccgatcacccaggcaaacggcgttcaggtgatctttgccagcctgaccggcgatattctgctggatgcgctgattggcgcgatgttcgccattatcagctactccagccttgctgctgtactgctgaccgcgactctgaccgccgcaggcattatctccttccccgtggcgctctgtctggtgattggtgctaacctcggttccggtctgctggcaatgctcaacaacagtgccgccaatgccgcagcccgccgtgtcgcgctgggtagtctgctgtttaagctggtgggtagcctgattatcctgccgtttgtccatttgctggcagagacaatggggaagttgagtttgccaaaagcggaactggtgatctatttccacgtcttctacaaccttgtacgttgcctggtcatgctgccatttgttgacccgatggcacggttttgcaaaacgattattcgcgatgaaccggaactggatacccagctacggcctaaacatctggatgtcagcgcgctggatacgcccacgcttgctctggcgaacgccgcgcgcgaaaccctgcgcattggcgacgccatggaacagatgatggaagggttgaataaagtgatgcacggtgagccacggcaggagaaagagctgcgtaagctggcagatgatatcaacgttctctacaccgccattaagctgtatctggcgcggatgccaaaagaagagctggcggaggaagagagccgccgctgggcagagatcatcgaaatgagcctcaaccttgaacaggcctccgatatcgtcgagcgcatgggcagcgaaattgctgacaaaagtctggcagcacggcgggcatttagccttgatgggttgaaggaactggatgcgctctatgagcaattgctcagtaatttaaagctggcaatgagcgtgttcttctctggcgatgtcaccagcgctcgtcgtttgcgtcgcagcaaacatcgttttcgcattcttaatcgccgctattcccacgcccacgtcgatcgcctgcatcagcaaaacgtgcagagcattgaaaccagtagcctacatttaggcttactgggagatatgcagcgcctgaacagcctgttttgtagcgtggcttacagtgtgctggaacagccggatgaagatgaaggacgggacgagtattaatattgtgaatcctgtaggcctgataagacgcgtcaagcgtcgcatcaggcactatgaacaagatgccggatcatgcatccggcaattcacttaaaaacggtgaccagcttccagcggaaccgcttcttcaccagccttaaacacataagtggtgttcgggccacccagcgtagcgtgacctttactcactgtgatccagttaccttccggtagaccaataatcgtcagttctggcgcgacgaccagcagttcgcgaatacgctgctcacgggtttcacctttatggccttccggcagcgcgttggtgaagtgcgggttgatttgcagcgggaacagatttagcgcatcgaaaccttgcggatcgacaatcggcatatcgttggtggtacgaatagttgggcaagcaaggttagcgcctgcgctccagccaatatacagagcgccacgtttaaccacgtcagtaattggtgccagcagcccgcgctcgcggcactgtttcagcaactggaaagtattcccgccgccgacaatcacgatctcagcattttcaatcgcggcaacgggatcgacaacgctatgaataccggtgacagaaacacccagcggagcgagaaccgcagccgttttcgctgtgtaatcatcccaggtctgcgttacgccagcgaaagggataaacaccgcactgcggcgaccctgcaactgttcagcaattagcggcagtgcatgttccagccaggctttacccggcagcgtgctgttactcaataaaagcagttccattacttctccggttagtaagaaatcacgggaggcatgctaccactgcgaatttaaccacttactgacatggctcacgatgtcgcacattgcttctggaaagtgatttgagcaggtaacgaattcaagccaatggaaataacaaatagttcgctcatgactattttttatcaacccaaaggtacggtatattccgttttttacaggagaatttatgctgcccgacagtagtgtccgtttaaataaatacatcagcgaaagcggaatttgcagtcgccgcgaagcggatcgctatatcgagcaaggcaatgtgttccttaatggcaagcgagccaccattggcgatcaggtgaaacccggcgacgttgtgaaagtaaacggtcagttgattgaacctcgggaagccgaagatttggtacttatcgccctgaacaagcccgttggtattgtaagcaccaccgaagatggcgagcgcgataacattgtcgatttcgttaaccacagcaaacgcgtgttcccgattggccgcctggataaagactcccaggggctgattttcctcaccaatcacggcgatctggtgaataagatcctgcgtgctggcaatgatcatgagaaagagtatctggtgacggtcgataaaccgattaccgaggagtttattcgcggcatgagtgcgggggtgccaatcctcgggacagtgaccaaaaagtgcaaagttaaaaaagaagcgccgtttgtcttccgcattaccctggtgcaggggctgaaccgtcagatccggcgcatgtgcgagcatttcggctatgaagtgaaaaagctggaacgcacgcgcatcatgaacgttagcttaagcggcattccgctgggggaatggcgcgatttaaccgacgatgagttaatcgacctctttaagctcattgaaaattcctcttccgaggtaaaacctaaagcgaaggccaaaccgaaaacagcgggcatcaaacgtccagtcgttaagatggaaaaaacggcggaaaaaggcggtcgcccggcgtccaacggtaagcgttttaccagcccggggcgtaaaaagaaggggcgctgattaacgcctcagactgatgaaaacggcccaaaagtgcccggacagtcccctcgccccttcgggaaaagggttagggtgaggggaaaattgtgttcacactgacgagtgaaaatctcaggcgttgattgtggattagcgcctgccgcgcgtgctcgtatttgcactccagctaaaactcgcttcaggatccggtttataagcctgctttttcttcaactggcgggcttttttcgcttcagcctcacgctcaaccattaatttatcgatgtaatctttcttaatgctgttggtttcggagttggtcaatacgcgaccatgcgcaatccgcgcccgatccagcagtgttttaagttcacgctgctcgcgttcagtcatctctttttgggtaatacgggggagtgccatgatggtgccctcagtgagccagagagttcagtgtacgggaattcgtttgcgagcagaactgataatattcattttgccttctcttaactatttatctctttcgataattaattagagatgcagataaaaaaattaaaggcaattattctccgataaagacgctggttaacagagtacaggctcgtttattgatgagcatagtgacaagaaaatcaatacggcccgaaatatagcttccaggccatacagtatttactcaaacaaattactatgcagtttttgcaccacctgctcggcatcttcgccgggcaccaggaagcacaggttatggctggatgcgccataacaaatcatgcgaatgttgaacggttccagtacgccgaatacctctttgccaacgccgcaggctttactcaggtcattgccaatcaacgcgaccagcgccagaccttcttccacctccacccgacacagtgcggaaagctccatcagcagagattgcgtcagcaacgtatcgccagtggaggtactaccggtggtatcaagggttaatgccacgctcacttcactcgtggtgattaagtctacgctaatattatgccgcgcgaggatgccgaaaacttccgcgaggaaaccgcgagaatgcagcatattcaggctgtgcaaagtgagcagagtctgattgcgacgaagcgccagagcgcggaacagcggcggattttcagttttattgcacaccagcgtaccacctgcgcgtgggtctttgctggagccgacaaagaccgggatatcgctgcgtactgcgggtagcaacgttgccggatgcagtacttttgcaccaaaagttgccatctctgccgcttcggcaaacgcgatttcatcaatgcgttttgctgcggaaactacgcgtggatcggtggtgtagatgcccgggacgtcggtccagatatcaacacgagatgcgtgtaaagcctccgccagcaaggctgccgtataatcgctgcctccacggccaagcgtcgttgtacgacctttattttcgctaccgataaatccctgggtgatcactaagccttcattgagacgtgggagcagctgcagcgcggccagttccgccagcgcggctatatctggctctgcacgaccaaatcggtcgttggtacgcatcactttacgtacatcaaaccactgtgcctgaacatcgcgttcgcgcaggatctcaacaaacagcagggtgctcatcagctcgccgtggctgaccagctcatctgtcagcgccggagacgttgccagcgccgccgcttctgccagaacagtaatgttctccagcagacgttcaatctcttcacggataacgttcgggtaacgcagacgttccagaatggcaaactggatgttgcggatagcgtcgagtttttcgaatcgctcgccaggttccagtccttcagctaaagcgaccagcagattagtgataccagcagaagcgctgaggacaactaaacgcacgttggcatcagaaagcacaatatcagcgctgcggttcatggcgtcaaaatcagctacgctggtaccgccaaatttggagacaacaatttcagacataactacctcgtgtcaggggatccattttcagccttggcacaagggaagagcggaagacgggtgggcgcagagcgatacttcgctactattttcacccagaagtgctccaccacttgcgaaacgcccgactgcgaacgcttctggtgacaacccaggggattcagcccctgtagccgatgatgaacgtggccagccgttcaatcacctcggcgatgcaccccctcaggtgttatcacaggactggctcctccaacaccgttacttgggcaacgcgcctcttctggcctgcgctagcgcaggtagtacatttataaataaagggtgagcggggcggttgtcaacgatggggtcatgcggatttttcatccactcctggcggtcagtagttcagctaataaatgcttcactgcgctaagggtttacactcaacattacgctaacggcactaaaaccatcacatttttctgtgactggcgctacaatcttccaaagtcacaattctcaaaatcagaagagtattgctaatgaaaaacatcaatccaacgcagaccgctgcctggcaggcactacagaaacacttcgatgaaatgaaagacgttacgatcgccgatctttttgctaaagacggcgatcgtttttctaagttctccgcaaccttcgacgatcagatgctggtggattactccaaaaaccgcatcactgaagagacgctggcgaaattacaggatctggcgaaagagtgcgatctggcgggcgcgattaagagcatgttctctggcgagaagatcaaccgcactgaaaaccgcgccgtgctgcacgtagcgctgcgtaaccgtagcaataccccgattttggttgatggcaaagacgtaatgccggaagtcaacgcggtgctggagaagatgaaaaccttcagtgaagcgattatttccggtgagtggaaaggttataccggcaaagcaatcactgacgtagtgaacatcgggatcggcggttctgacctcggcccatacatggtgaccgaagctctgcgtccgtacaaaaaccacctgaacatgcactttgtttctaacgtcgatgggactcacatcgcggaagtgctgaaaaaagtaaacccggaaaccacgctgttcttggtagcatctaaaaccttcaccactcaggaaactatgaccaacgcccatagcgcgcgtgactggttcctgaaagcggcaggtgatgaaaaacacgttgcaaaacactttgcggcgctttccaccaatgccaaagccgttggcgagtttggtattgatactgccaacatgttcgagttctgggactgggttggcggccgttactctttgtggagtgcgattggcctgagcattgttctctccatcggctttgataacttcgttgaactgctttccggcgcacacgcgatggacaagcatttctccaccacgcctgccgagaaaaacctgcctgtactgctggcgctgattggcatctggtacaacaatttctttggtgcggaaactgaagcgattctgccgtatgaccagtatatgcaccgtttcgcggcgtacttccagcagggcaatatggagtccaacggtaagtatgttgaccgtaacggtaacgttgtggattaccagactggcccgattatctggggtgaaccaggcactaacggtcagcacgcgttctaccagctgatccaccagggaaccaaaatggtaccgtgcgatttcatcgctccggctatcacccataacccgctctctgatcatcaccagaaactgctgtctaacttcttcgcccagaccgaagcgctggcgtttggtaaatcccgcgaagtggttgagcaggaatatcgtgatcagggtaaagatccggcaacgcttgactacgtggtgccgttcaaagtattcgaaggtaaccgcccgaccaactccatcctgctgcgtgaaatcactccgttcagcctgggtgcgttgattgcgctgtatgagcacaaaatctttactcagggcgtgatcctgaacatcttcaccttcgaccagtggggcgtggaactgggtaaacagctggcgaaccgtattctgccagagctgaaagatgataaagaaatcagcagccacgatagcagcaccaatggtctgattaaccgctataaagcgtggcgcggttaatcatcgtcgatatgtaggccggataaggcgttcacgccgcatccggcaaccgatgcctgatgcgacgcggtcgcgtcttatcaggcctacaggtcgatgccgatatgtacatcgtattcggcaattaatacatagcacgattgattaaataaccttaataacaatgccgacgttatgtcggcatttttttatcagataaatccccttgtctgtaatttaacggaaatcataccgtgaggttaatcctaaaatagatttttaatcgttgtttatttcggaaaatacgcagattaattgcttttgtttttattttaagtttatgatttttattgttatttaaatataagttgaaacttatatttgatattcattccaattatcctaaaacgccatcgctaattccccgcgccgtaattcgcatgctttagttgtgtatactcgatcccgcccgaaatgtttttgggtaaatctccattcattcaatgaagggaaattgttatgaaaaaagttctgtatggcatttttgccatatctgcgcttgcggcgacttctgcgtgggctgcacctgtacaggtgggcgaagcggcagggagcgcagcaacgagcgttagcgcggggagttcctccgcgaccagcgtcagcaccgtaagcagcgcggtgggtgtcgcgcttgcggcaaccggtggcggtgatggttctaataccgggaccaccacaaccacgaccaccagtacccagtaataaagtatgtatccccaaaataattcgagtcattgcatctgtggctagaagtatgaagggattaaccataaccacactccggtgtggttattctgcccctctggagaagagtcgtgaagcgacctgcactcattcttatctgcctgttattacaggcctgtagtgccacgactaaagagctgggcaatagtctgtgggacagtctgttcggcacgccaggcgtacagctgacggatgatgatattcaaaatatgccctacgccagccagtacatgcagcttaatggcgggccgcagttatttgtggtgctggccttcgctgaagacggacaacaaaaatgggtcactcaggatcaggctactctcgttacccaacatggccgtctggtgaagactctgctcggcggcgacaacctgattgaagtgaataaccttgctgccgacccgctgattaaacccgcacaaatcgttgatggcgcaagctggacgcgcacgatgggctggaccgagtaccagcaggtacgctacgccaccgcacgcagtgtcttcaaatgggatggcaccgataccgtcaaagtcggcagcgatgaaaccccggttcgcgtgctggacgaagaagtctccaccgaccaggcgcgctggcataaccgctattggatcgacagcgaagggcaaattcgccagagcgaacagtatctcggcgcggattattttccggtgaaaaccactctcatcaaggcggcaaaacaatgattaaacaaactattgtcgcgttgcttttgagtgtgggagcgagtagcgtcttcgcggcaggaaccgtcaaggtgttcagcaatggcagcagtgaggccaaaacgctaacgggcgcagagcatttaatcgatctggtaggccaaccgcggctggcaaacagctggtggcccggtgcggtgattagcgaagagctggcaacggcggcagcattgcgtcagcagcaggcgttgctgacacggctggcagaacagggcgcagattccagcgccgacgatgccgctgcgattaacgccttacgccagcaaattcaggcgttgaaagtgacgggcaggcaaaaaatcaatcttgatcccgatatcgtccgcgttgccgaacgcggtaacccgccgttgcagggcaactacacgctgtgggtcggaccaccgccgtccacggtcacgttgttcgggcttatcagccgtcctggcaagcagccattcactccaggtcgcgacgtggcgagctatctctctgaccagagcctgctcagcggtgcggatcgcagctacgcgtgggtggtttacccggacggacgcacgcaaaaagcgccggtggcttactggaacaagcgtcacgtagagccgatgcccggcagcattatttatgttggcctcgcggactccgtctggagtgagacgcctgatgcccttaacgccgacattcttcagactctgacgcagcggatacctcaataatgaaaaaaagacatctgcttagcttactggcgctgggcattagcacagcttgctacggcgaaacatatcctgcgcccattggtccgagccagagcgatttcggtggcgtaggattattacaaacgcccaccgcgcgtatggcacgggaaggggagttgagtctgaactatcgcgataacgatcagtaccgttattacagtgctagtgtgcaactcttcccgtggctggaaacaacgctgcgctacaccgacgtgcgcacccggcagtacagcagcgtcgaagcgttctctggcgatcaaacgtataaagataaagccttcgatctcaaactgcgtttgtgggaagagagttactggctgccgcaagtggcggttggtgcgcgggatatcggcggtacggggctgtttgatgcggaatatcttgttgccagcaaagcctgggggccgttcgattttacgctcggcctgggctgggggtatttgggcaccagcggtaatgtgaaaaatccgctctgtagtgccagtgataaatattgctatcgcgataacagctacaaacaggcgggatctatcgacggtagccagatgttccacggtcctgccagtctgtttggcggcgtggaataccagacgccctggcaaccgctgcgcctgaaactggagtatgaaggcaataattatcagcaggattttgccgggaagctggagcaaaaaagtaagtttaacgtcggtgcgatttatcgcgttaccgattgggccgacgttaaccttagctatgaacgtggcaacacctttatgtttggcgttacgttgcgcaccaactttaacgatctgcgcccgtcttacaacgataacgcccgcccgcaatatcaaccgcagccgcaggatgccattttgcagcatagcgtggtggcgaatcagttaacgctgttgaaatacaatgccggacttgccgatccacagatccaggcgaaaggcgatacgctgtatgttaccggcgagcaggtgaaatatcgtgatagccgcgaagggatcatccgtgcgaatcggatcgtgatgaacgatctgccggatgggatcaaaacgatccgcattacggaaaatcgccttaacatgccgcaggtgacgacggaaaccgatgtcgccagcctgaaaaatcatctcgccggagagccgttgggccacgaaacgacgctggcgcaaaaacgcgtcgagccagtggttccgcagtccaccgagcagggctggtatatcgacaaaagtcgctttgatttccatatcgatccggtgctgaaccagagcgtcggtggcccggaaaacttttacatgtatcagctgggcgtgatgggaacggcagatttgtggctgacggaccatctgctgaccaccggcagcctgtttgcaaatcttgccaacaactacgacaagtttaactacactaatcctccgcaggacagccacttaccgcgcgtgcgtacccatgtgcgcgagtatgtgcagaacgatgtctatgtgaataacctgcaagccaactacttccagcatctgggcaacggcttctacggtcaggtctacggtggttatctcgaaaccatgtttggcggtgcgggggcagaagtgttgtatcgcccgctggacagcaactgggcgtttggtctggatgccaactacgttaaacagcgcgactggcgtagtgcaaaagatatgatgaaattcaccgactacagcgtgaaaaccggacatctgaccgcctactggacgccatctttcgctcaggatgtgttagttaaagccagcgtcgggcagtatctggcaggggataaaggcggcacgctggagatcgccaaacgctttgatagcggcgtggtggtgggtggctatgccacgatcactaatgttagcaaagaggagtacggcgaaggggacttcaccaaaggcgtgtatgtcagcgtaccgttggatctcttcagctctggcccgacacgcagccgtgcggcgattggctggacgccgctgacgcgtgacggtggtcagcaacttgggcgtaagttccagttgtatgacatgaccagcgaccgtagcgtcaatttccgctaagtcatgggaaaggtgccagttttcgcactcactggcaccttcattcttaatggcctgtcgagccatcaggaacgcagttcactcccggtttgcgatctggtgtgtaaaggcgaaaacattctgtcttcctgtccgtcgatatcggttgcaggtctggttgcctgagcgactgggccatcattgggctggagacattgctttgcggtaggtcggctttatcagcagtaccgagcggaccagcataagcaggaagaacagagactgataacatcaaagcagcaaaataaggcttcatttttaccacctttatcaggttacgtttcatttgttccagaggaacattgtcgatttttcgcgcattgctggtggctgggaatcacctgaatgggtgatttttgaattaccggctttggtgcggtttgtcttgccggatgcgccgccaggcgcggcttatccggcctacgggtaggtatatccggctttggtggaggcgcgctccaaatccaggttgaacaaaacatacacaaaaaatatagatctccgtcacatttttgcgttatacaggaagctcgccactgtgaaggaggtactgctatgacgagtctctctcgtccgcgcgtggagtttatctccaccattttgcagaccgtactcaatcttggcctgctgtgcctcggcctgattttggttgtcttcctcggcaaagaaacggtgcatctggctgatgtgctgttcgcgccagaacaaaccagcaaatatgagctggtagaaggactggtggtttactttctctatttcgaatttatcgcgctgattgtgaagtactttcagtccggttttcacttcccgctacgttactttgtctatattgggatcaccgccattgtgcgcttgatcatcgtcgatcataaaagcccactggatgtgttgatctacagcgctgcgatcctgttactggtgatcaccctgtggctgtgtaatagcaaacggctgaagcgggagtaaaaagtcagcacgccgaaatggcgcggcgtgctggacaggaagattacagcgtagcagtttgttgtgttttcttcgtttccggttcccagagcgcttccagctcctcaagggttttacctttggtttccgggacaaatttccacataaacagtgctgccagaacgcccatacaaccgtaaatccagtaggagaaaccgttgtggaaatgggccaccagccaggagtttttgtccatcatcgggaaggtccaggagacgaagtagttcgccagccactgggccgccaccgcgattgccagcgctttaccacgaatagcattcgggaagatttcgctcagcagtacccagcataccggaccccaggacatggcaaaggcggcaacatagaacagcatgctcagtagcgccacaatacccggtgcctgagtgtaaaacgcggtaccgaggctaaacataccgattgccattccgagtgcgccgataatttgcagtggcttacgaccaaatttatccaccgtcataattgccagaacggtgaaggtgaggttgataactccgacaataatggtctgcaacagcgcgatatccgtgctggcccccagcgttttgaacacttccggcgcgtagtacagcaccacattgatgccgacaaattgctggaagatggagagcattacgccgattacaatcacgcccacgccaaacatcagcagacgaccaccggttttgcggccatgatccagggagtgtttaatttcctgtactgcctgagttgcaagcgtgttgcccataattttgcgcaggataccttccgcctgttcttgcttgccgcggctcatcagccagcgaggactttctggcacggtatacagcagcattaagaacagcagtgcagggatacattcgctggcaaacatataacgccagccgtcagtattcagccagctggcatcaccggaacgggcaataaaatagtttacgcagtaaactaaaagttgcccgaaaataatcgcaaactggttaaaagagaccagtttcccgcgaatatgagctggagccagttccgcaatatacattgggctgagcatactggctaaaccaacgccaataccgccaataatgcgataaataacaaattccgggacataacctgccagataaacaggcacagtgttgtccgggtttatagaggtaaaaccaagttctggccaggcagaacctacaccagaaataaaaaacaggacagcagcaatcttaagactatcacgacgaccgaagcggttactgcaataaccaccgagggcaccgccgatgatgcaaccaatcagagcgctggccacgcaaaaccctaacagggagttggcagcggattcacttaagttttgtggagcaacaaagacggtattgagactctcaacagtaccggaaataacggcggtgtcgtagccaaataataaaccacctaatgtagcgactaaggtaatgctaaatatataactggaattatactgggtattcattcagacctgccttagaccattctgatcttttatcagtgcattgatgttggaattgtcaggcagttaaggcaattatcattttttacaatgcgtttacgtaatgtcttttctgtgatcttaattgtgataattatccaaaattgataaaaacaatactattgccgtgactcagagcacgaaagagaattatcgtaagtgggaaaacaaataacgtaaaaataataagctctatgatggaaatattaaccggcgaacgattcagattgcagacgaaagaaaaaaaggcgctccgtggagcgccgaataacagtcacaagttgggataacgtaagttgagggtgcagcggcataacattggcagaacaacatctttaacctttcacaccacctgccgtcaggccgttgaccagccagcgttgagccagcaagaagacgatggtgatcggtaatgcagacatcacggcagcggcggcaaagtcaccccacaggtagttttgcgggttgaggtattgctgcatccccacggccagggtgtagctgtttacgtcacgcagtaacaggctcgcgaccggaacttcagtaatggcagcgataaagctcaggatgaataccaccgccagaatcggtacactcagcggcaacaggacaaggcggaaggcctgccacggtgtcgcaccatccagcgcagcagcttcttccaggctactgtcgatggtttcgaaatagcctttgatggtccagacatgcagcgcaatcccacccagatacgcgaaaattacgccgccgtgagtattcaggccaatgaatggaatgtactcacccagacgatcaaacaacgcatacaacgcgaccagactaagtactgccgggaacatctggaaaatcagcattcctttcagcagcgtcgctttgcctggaaagcgcatacgggcgaaagcgtaggcgcaggtggtggagagcgccacaatgccaatcgcggaaatcccggcgacctttacgctgttccacagccacagcagtaccgggaatggcggtggcgtaatgcgaccatcagcctgttcaacgctaaaacctaacgccagtttccagtgatcccaggagatttgctccgggatcaggctgccggtcgcaaagtttccctgacgcaggctgatagcgacgaccatcagcagcgggaacataatcgctgcgataaaaagtagcagtagcaggtgagtaataaataaacgagctttttggcttttcggttggaccattgccatttttgttatctcccttaatcaaacttcattcgcgtggctttcaggttcactatcgccagcgcacccaccagcaggaagatcagcgtggcaattgctgccgccagaccgaagtcctgacccccgccgccttcaaaagcgatgcggtaggtgtagttaacaagcaggtcggtataaccggctggcgtggtcgtgccaagacgatccgggccgccgttggttaacagttgaatcagcacgaagttgttaaagttaaaggcgaagctggcgatcatcagcggcgtcagcggtttaatcagcagcggcagcgtaatcttaaagaagttctggaacggacctgcgccatccattgcactggcttcatacaaatcgtccggaatcgctttcagcaagcccatgcagaggatcatcatgtacggataacccagccaggtattgacgataattagcatcgtgcgggcggtggtcggatcgctgaaccaggcgggcttcacgccaaacagcgcgctcaacatcatgttgatttcaccgaagctctggttaaacaaccctttgaaaatcaagatactaatgaagcttggcaccgcgtagggcagaatcagcaggacgcgatagaccgctttgccgcgcaacgcttcccactgcaccagacacgccagaaccatgccgaccgccaccgttaaaaagacagtgatcaggctgaacaccacggtccagacgaaaatggcgaggaacggtttctgaatgccttcgtcggtaaagacgcgggtaaagtttttccagccggtggtcacggtgtaaccggggcttagcttttcatcaccccagttgccgtcggcggtaatggactggtaaaagccaatttggttattcggacgatatttcacgccgctctgattattcgtcaacgtgccgtcaccgtcgagtgtgtagagcggctgcgtgccagaaaactggcgcagggagctcatcatcactttgttgccatccggcagaatggcggtaatgtcactcagcgcctgacgattctgggtaatcacgcgcagattcgcgcgttcgccttcgggctgggcggtcgtttctttcagttgcagtttttgctcgccgccaaatttaaaagcgtcggagaggtaatttttgccggtttcgccgtcgctgagcgccagttgccactcatcgcccgccgggtaaagaccaaagttataggttttgcctgcttgccaggagcgatctaacaacacttcctgcgcacgttcaaaagtcagctggttagtgctgctgtagttggtgaaggcaatggcgatggtgcagaccagagggaagaggacgaataatcccattccagccattcccgggtaaacatagcgccaggcgtaggctttacgattggcgaaaatatacagccccgcactactcaatatcagcgtggtaatggcgaacaggtattccccttgtgcgtacattaaaacaacaaggtaacccaccagcaggccgagcagacctagcacactccatttcagcgcgtcgctttgccaccaatgtttctttttaatgacatccatggggttcttcctcattccaggacggataaggctttcacgccttatccgacaacaactgcctgatgcgacgctgacgcgtcttatcaggcctacatacgtttcggttttgtaggccggacaaggcgttcacgccgcatccggcatttcacagcattacttggtgatacgagtctgcgcgtctttcagggcttcatcgacagtctgacgaccgctggcggcgttgatcaccgcagtacgcacggcataccagaaagcggacatctgcgggatgttcggcatgatttcacctttctgggcgttttccatggtggcggcaatacgtggatctttcgccaactcttcctcgtaagacttcagcgctacggcacccagcggtttgtctttattaaccgcttccagaccttcatcagtcagcagatagttttcgaggaactctttcgccagctctttgttcggactggcggcgttaatacctgcgctcagcacgccaacgaacggtttggatggttgacccttgaaggtcggcagtaccgttacaccataattcactttgctggtgtcgatgttggaccatgcccacgggccgttgatggtcatcgctgtttcgcctttattaaaggcagcttctgcgatggagtaatcggtgtctgcattcatgtgtttgtttttaatcaggtcaaccaggaaggtcagacccgctttcgcgccagcgttatccacgcccacgtctttaatgtcgtacttgccgttttcatacttgaacgcataacccccgtcagcagcaatcagcggccaggtgaagtacggttcttgcaggttgaacatcagcgcgctcttacctttcgctttcagttctttatccagcgccgggatctcttcccaggtttttggcgggttcggcagcagatctttgttataaatcaggcttaacgcttcaacagcgatcgggtaagcaatcagcttgccgttgtaacgtacggcatcccaggtaaacggatacagcttgtcctggaacgctttgtccggggtgatttcagccaacaggccagattgagcgtagccaccaaagcggtcgtgtgcccagaagataatgtcagggccatcgccagttgccgcaacctgtgggaatttctcttccagtttatccggatgctcaacggtgactttaattccggtatctttctcgaatttcttaccgacttcagcgagaccgttatagcctttatcgccgttaatccagattaccagtttaccttcttcgattttggcgagagcgctggcggaaaacatcatcgtcgttaatgcggataatgcgaggatgcgtgcacctgtttttattttcataatctatggtccttgttggtgaagtgctcgtgaaaacacctaaacggactctagtttctttatacggcaacctctttccatcctccttgcccctacgccccaccgtcgctttgtgtgatctctgttacagaattggcggtaatgtggagatgcgcacataaaatcgccacgatttttgcaagcaacatcacgaaattccttacatgacctcggtttagttcacagaagccgtgttctcatcctcccgcctcctcccccataaaaaagccagggggtggaggatttaagccatctcctgatgacgcatagtcagcccatcatgaatgttgctgtcgatgacaggttgttacaaagggagaagggcatggcgagcgtacagctgcaaaatgtaacgaaagcctggggcgaggtcgtggtaagcaaagatatcaatctcgatatccatgaaggtgaattcgtggtgtttgtcggaccgtctggctgcggtaaaagcactttactgcgcatgattgccgggcttgagacgatcaccagcggcgacctgttcatcggtgagaaacggatgaatgacactccgccagcagaacgcggcgttggtatggtgtttcagtcttacgcgctctatccccacctgagtgtagcagaaaacatgagttttggcctgaaactggctggcgcaaaaaaagaggtgattaaccaacgcgttaaccaggtggcggaagtgctacaactggcgcatttgctggatcgcaaaccgaaagcgctctccggtggtcagcgtcagcgtgtggcgattggccgtacgctggtggccgagccaagcgtatttttgctcgatgaaccgctctccaacctcgatgctgcactgcgtgtgcaaatgcgtatcgaaatctcccgtctgcataaacgcctgggccgcacaatgatttacgtcacccacgatcaggtcgaagcgatgacgctggccgacaaaatcgtggtgctggacgccggtcgcgtggcgcaggttgggaaaccgctggagctgtaccactatccggcagaccgttttgtcgccggatttatcggtagcccaaagatgaacttcctgccggtaaaagtgaccgccaccgcaatcgatcaagtgcaggtggagctgccgatgccaaatcgtcagcaagtctggctgccagttgaaagccgtgatgtccaggttggagccaatatgagcctgggtattcgcccggaacatctactgccgagtgatatcgctgacgtcatccttgagggtgaagttcaggtcgtcgagcaactcggcaacgaaactcaaatccatatccagatcccttccattcgtcaaaacctggtgtaccgccagaacgacgtggtgttggtagaagaaggtgccacattcgctatcggcctgccgccagagcgttgccatctgttccgtgaggatggcactgcatgtcgtcgactgcataaggagccgggcgtttaagcaccccacaaaacacacaaagcctgtcacaggtgatgtgaaaaaagaaaagcaatgactcaggagatagaatgatgattactctgcgcaaacttcctctggcggttgccgtcgcagcgggcgtaatgtctgctcaggcaatggctgttgatttccacggctatgcacgttccggtattggttggacaggtagcggcggtgaacaacagtgtttccagactaccggtgctcaaagtaaataccgtcttggcaacgaatgtgaaacttatgctgaattaaaattgggtcaggaagtgtggaaagagggcgataagagcttctatttcgacactaacgtggcctattccgtcgcacaacagaatgactgggaagctaccgatccggccttccgtgaagcaaacgtgcagggtaaaaacctgatcgaatggctgccaggctccaccatctgggcaggtaagcgcttctaccaacgtcatgacgttcatatgatcgacttctactactgggatatttctggtcctggtgccggtctggaaaacatcgatgttggcttcggtaaactctctctggcagcaacccgctcctctgaagctggtggttcttcctctttcgccagcaacaatatttatgactataccaacgaaaccgcgaacgacgttttcgatgtgcgtttagcgcagatggaaatcaacccgggcggcacattagaactgggtgtcgactacggtcgtgccaacttgcgtgataactatcgtctggttgatggcgcaagcaaagacggctggttattcactgctgaacatactcagagtgtcctgaagggctttaacaagtttgttgttcagtacgctactgacagcatgaccagccagggtaaagggctgagccagggttctggcgttgcatttgataacgaaaaatttgcctacaatatcaacaacaacggtcacatgctgcgtatcctcgaccacggtgcgatctccatgggcgacaactgggacatgatgtacgtgggtatgtaccaggatatcaactgggataacgacaacggcaccaagtggtggaccgtcggtattcgcccgatgtacaagtggacgccaatcatgagcaccgtgatggaaatcggctacgacaacgtcgaatcccagcgcaccggcgacaagaacaatcagtacaaaattaccctcgcacaacaatggcaggctggcgacagcatctggagtcgcccggctattcgtgtcttcgcaacctacgccaagtgggatgagaaatggggttacgactacaccggtaacgctgataacaacgcgaacttcggcaaagccgttcctgctgatttcaacggcggcagcttcggtcgtggcgacagcgacgagtggaccttcggtgcccagatggaaatctggtggtaatagcaaaacctgggccggataaggcgtttacgccgcattcggcaaccaacgcctgatgcgacgcttgcgcgtcttatcaggcctacaacggctgtcaaatgtaggccggataaggcgtttacgccgcatccggcataaaaacaggttgtcattatctgaaaggggcgaaagcccctctgattatcgggtttagcgcgctattgcctggctaccgctgagctccagattttgaggtgaaaacaatgaaaatgaataaaagtctcatcgtcctctgtttaagtgcagggttactggcaagcgcgcctggaattagccttgccgatgttaactacgtaccgcaaaacaccagcgacgcgccagccattccatctgctgcgctgcaacaactcacctggacaccggtcgatcaatctaaaacccagaccacccaactggcgaccggcggccaacaactgaacgttcccggcatcagtggtccggttgctgcgtacagcgtcccggcaaacattggcgaactgaccctgacgctgaccagcgaagtgaacaaacaaaccagcgtttttgcgccgaacgtgctgattcttgatcagaacatgaccccaagtgccttcttccccagcagttatttcacctaccaggaaccaggcgtgatgagtgcagatcggctggaaggcgttatgcgcctgacaccggcgttggggcagcaaaaactttatgttctggtctttaccacggaaaaagatctccagcagacgacccaactgctcgacccggctaaagcctatgccaagggcgtcggtaacagcatcccggatatccccgatccggttgctcgtcataccaccgatggcttactgaaactgaaagtgaaaacgaactccagctccagcgtgttggtaggacctttatttggttcttccgctccagctccggttacggtaggtaacacggcggcaccagctgtggctgcacccgctccggcaccggtgaagaaaagcgagccgatgctcaacgacacggaaagttattttaataccgcgatcaaaaacgctgtcgcgaaaggtgatgttgataaggcgttaaaactgcttgatgaagctgaacgcctgggaagcacatctgcccgttccacctttatcagcagtgtaaaaggcaaggggtaattacgccccacagtgctgattttgcaacaactggtgcgtctcctggcgcacctttttttatgcttccttcctgggatatgagcgattttttatagtaactcacttcttcttcactaagaatatccattatctcaatgccttatcagagattcttttcctttcgccggtagtgtctggacattcaggctacttttccaggttattttatttctgttatgcagaggttttatgataagtcatatcctaaattctggcggcaataactctttgatgaaacatgatgtggtgcaaggaaataatatagtagatcttgatttactacgtaatttaaatggggtgccaggtttaaacagagataactttatttatatcagcaatattttttcaaatataaaacaacggaacgaaaaaatcatgcaataaatatgtttcgtgaagtctcaatcagtaatgatactataagtgtaaaattctacagaaatgaaaaaaattgaatgcgcttgcaattttctgatggataaagatgcgcaggggtatatcgacctgtctgatttggatttaacaagttgtcattttaaaggtgacgttataagcaaggtgtcttttttaagtagtaatctacaacatgtaacattcgaatgtaaagaaattggggattgcaattttactactgcaatagttgataatgtcatatttagatgtcgacgtttacacaatgtgatttttatcaaagcgagtggtgaatgtgtcgatttcagcaaaaatattcttgatacagttgacttcagccagagtcaacttggtcatagtaattttcgcgaatgtcagattagaaatagtaacttcgataattgttatctttacgctagccacttcaccagagcagagtttctgtctgccaaagaaataagttttattaaaagcaatttgacagctgttatgtttgattatgtgcgaatgagcacagggaattttaaagattgcattacagaacaattggaattaactattgattatagtgatatattttggaatgaagatctcgatggttatatcaataacattataaaaatgattgatacattgccagataatgcaatgatattgaaatccgttctggccgtaaaactggtgatgcaattaaaaatacttaatattgttaataaaaactttattgagaatatgaagaaaatatttagccattgtccttatataaaagatcccattatacgcagttatatccattctgatgaagataacaagttcgatgattttatgcgtcaacatcgattcagtgaggtgaatttcgatacccaacagatgatcgattttattaacagatttaatacgaataaatggctaattgataaaaataacaatttttttatccaacttatcgatcaggccttacgaagtacggatgatatgatcaaagcaaatgtttggcatctttataaagagtggattcgtagtgatgatgttagtcctatatttatagaaactgaagataatttaagaacctttaacacgaatgaattaacacgaaacgataatatctttatcctgttctccagtgtcgatgatgggccagttatggtggtaagctcccagcgcttacatgatatgttgaatcctacaaaagataccaattggaattccacgtatatctacaaatccagacatgagatgttgcctgttaatcttactcaggaaacacttttcagctccaaatctcatggtaaatatgcgcttttccccatttttactgcgagttggcgagctcatcgtataatgaataagggtgtttaagtaaaggaaaacatcaccgttcctggcatcctggacggtgatgcccctacggttgccctcgccagcacgggcatcggtaaagcgtaaggttcaacatcgttttaccacttcatgcgattgttgcgtttttgttgcgtattagatcacttaatttgctttacatctcccgtaaacacttttctgcgatacaatgcctttacgttatgtaacggagagttcggcatgagtcaccccgcgttaacgcaactgcgtgcgctgcgctattgtaaagagatccctgccctggatccgcaactgctcgactggctgttgctggaggattccatgacaaaacgttttgaacagcagggaaaaacggtaagcgtgacgatgatccgcgaagggtttgtcgagcagaatgaaatccccgaagaactgccgctgctgccgaaagagtctcgttactggttacgtgaaattttgttatgtgccgatggtgaaccgtggcttgccggtcgtaccgtcgttcctgtgagtacgttaagcgggccggagctggcgttacaaaaattgggtaaaacgccgttaggacgctatctgttcacaagtagcacattaacccgggactttattgagataggccgtgatgccgggctgtgggggcgacgttcccgcctgcgattaagcggtaaaccgctgttgctaacagaactgtttttaccggcgagtccgttgtactaagaggaaaaaaatatggagtggagtctgacgcagaataagctgctggcgtttcatcgcttaatgcgtacggataagccaattggcgcgttactgctgctctggccaacattatgggcgttgtgggtggcgacaccgggcgttccccagctctggatcctggcggtgtttgtcgcgggtgtctggctgatgcgcgctgccggatgtgtggtgaatgattatgctgaccgcaagtttgatggtcatgttaagcgcacggcgaaccgaccacttcccagcggcgcggtaacagagaaagaggcgcgcgcgctgtttgtcgtgctggtactgattagctttttactggtgctgacgctgaatacgatgaccattctgttgagcattgccgcgctagcgctggcgtgggtgtacccgtttatgaagcggtatacccatctaccgcaagtggtgctgggcgcggcgtttggctggagcattccaatggcttttgccgctgtgagtgagagcgtgccattgagttgctggttaatgttcctcgccaatattctctgggcggtggcttacgacacgcagtatgcgatggttgaccgcgatgatgatgtgaagattggcattaaatccacggcaatcctgttcggccaatacgataaattgattattggtattttgcagattggcgtactggcactgatggcgatcatcggtgagttaaatggcttaggctggggatattactggagtattctggtggctggcgcgctgtttgtttatcaacaaaaactgattgccaaccgcgagcgtgaagcctgctttaaagcatttatgaataataactatgttggtctggtactatttttagggctggcaatgagttactggcatttctgatgatgtaaaaaagccggatgatcatccggctttcttctgggttgcctgatgcgcggcgcttctcaggcctacacaacacatcgcaatttattgaatttgcagattatggaaggccggataaggcgttttcgccgcatccggcaattctctctgattacccttcgccctgcgtcgcactctcaatcgtcaaacgcacgtcacttgtaatcaactccgccagcaactgataaaccttcatcgtttctgccggttcggcatcgccgctatcgctgatatacccttcatcacgcagtgtcagcaccagagaactgaacaccgccttgtcgaagaactccggcgcgttgatgccgtgcagcacggagagacgttgcgcgacggtgcggctctctttctccagcgtaccgcggttgatgctcgggttggcactcaacaaccagaaggtgatggcataacgttgcagcgtttcgcgcgcgcctgcggccagcagctgtagcgtgcgagaatgcgccgggttgatatgcaactcatcatcttgcagggtaatcagcccctgacgttgcatctcatttgccagcgcatcaataacgtccggcaactcgtcgcgatcccagcgcaggaacagctccgctttcagcattgggtaaagcacattgacgtgctccatcaatacgtcgcgggagatgtggcgatgctgggtgacgattgccgccatcaggctaggcagcaccaacatatgcgcaatgttgttgcgatagtaggtcatcagcaccgcttgctcgcgcggcagaatgatgatgtcgccgattgtgtctttctcgacttcaaacttgttcatttgcagcgcgtgatcgataagctcgctggcgctggcactaggaacggtagagtccgtggagtagggcacgttgcgcatcagatccaggtagcagttgagttgctcggttaactgctcgcgggtgagactgcgctgacgacttgccagtagcgcagtacagcacaggttcatggcgtttgccgcgcctgcgttgttaatgcgtaccatcagatcggcagcaatattattgaccgtcggcgttaaccatgccggacgcaccgcttcgatgggatcgatagattcacgccagtcaggtacatgctggttaaggtaggtcatcaacggcattggttcaccgaagttgacgtaaccctgaccgagattacgcagcttgcttaaaccgcgcagcatctgcggcaggctctctttctctttcgtcgcgccgcgcagttctttggcgtaagtacccacttccatgacgtgctcataaccgatatagatcggaatcagcgtaatcggacgcgtgccgccacgcagcatcgcctgaatggtcatgctcagcgtaccagttttcggatccagcaaacgccccgtacgggaacgaccgccttccacgaagtactcgacggaataaccacggctgaacagttcgccgagatactcccggaaaacggtggaataaagtttattgcctttaaacgtacggcgaataaagaacgcccccagacggcggaaaatcggcccggcaggccagaaattcaggttgatcccggcggcgatatgcggcggcaccagcccctggtgatacagcacgtaagaaagcagcaggtagtccatgtgactgcggtggcaaggcacatataccagctcatgaccgtcgtgggccagctggcgaacgcgctcagcgttatggacgttgatgccctggtaaagtcggttccaggtgaagcccagaatacggtcagtcaggcgaatcatctcgtaagagaaattcgccgcaatctcttccatcagtgcaatcgcgttctgctgcgctttttcatgggagatttttttgctgcgcgcttcatcttctaccgctttggcaatggcgcgggaggcgagcagcttattaaacagatcctgacgagcaggcaaacgtgggcctacggcagccagacgttgacgggcaaagtgcatacgcgccacgcgcgccagtttctgagcgatagttttatccgtgccgtgttcatccgccatacggcgcaggctaacactcgggctgaaacgcacaaaactgtcgcgaccgagccacagtacagcgaaaaatttctgtacgccgttaagcatacgcagcggcgggttcacttcgcctttttcacgccccggcgcgcgaccaaacatcacgctcactggcaccatctgcacatccagatttgggttgctacggtgcaaatcgagatagtcgtggaacagcttaatagactcttctttcggcgtgtaataggtgaacacacgcggcccgccgtgaatgaacacatagcgcggcagtagcgtgccgtcgatttccagcggctctaacgggtcaggcaagtcatgtgccagacactgggcgcgcaacgtcagcaaatctgctttgctgttgtacggtaaaacgtacataattggacgagaggtatccagccccagttccggggcaggatctgccggaatagacttgctttttaccaggatgcttaatggtaaattcagtaatttgtagtaaattcgtggccagccggacataaacgatgtaaagcctctggttaataatgcaaatgcgcggcaaggatagcagaaagtcatgggaaattctgtggtatccgctcatgtttcgcgcggcgctacgcaaacccgaatcatcggatttaacggtacactgatattgacgctcataatgtaaaaaggttctttcaatggccaataataccactggattcacccgaattatcaaagctgctggctattcctggaaaggtttacgcgctgcatggatcaacgaagcggcattccgtcaggaaggcgtagcggtattgttggcggtggtcatcgcctgctggctggatgtggacgcgattacccgcgtgctgcttatcagctccgtgatgctggtgatgattgtggaaatcctcaatagcgccatcgaagcagtggttgaccgaattggctctgaataccatgagctttccggacgcgcaaaagatatgggatccgctgcggtgctgattgccattatcgtcgccgtgattacctggtgcattctgttatggagccattttggataacccttccagaattcgataaatctctggtttattgtgcagtttatggttccaaaatcgccttttgctgtatatactcacagcataactgtatatacacccagggggcggaatgaaagcgttaacggccaggcaacaagaggtgtttgatctcatccgtgatcacatcagccagacaggtatgccgccgacgcgtgcggaaatcgcgcagcgtttggggttccgttccccaaacgcggctgaagaacatctgaaggcgctggcacgcaaaggcgttattgaaattgtttccggcgcaagtcgcgggattcgtctgttgcaggaagaggaagaagggttgccgctggtaggtcgtgtggctgccggtgaaccacttctggcgcaacagcatattgaaggtcattatcaggtcgatccttccttattcaagccgaatgctgatttcctgctgcgcgtcagcgggatgagcatgaaagatatcggcattatggatggtgacttgctggcagtgcataaaactcaggatgtacgtaacggtcaggtcgttgtcgcacgtattgatgacgaagttaccgttaagcgcctgaaaaaacagggcaataaagtcgaactgttgccagaaaatagcgagtttaaaccaattgtcgttgaccttcgtcagcagagcttcaccattgaagggctggcggttggggttattcgcaacggcgactggctgtaacatatctctgagaccgcgatgccgcctggcgtcgcggtttgttttagttctctcttcatcaggcttgtctgcatggcattcctcactagttctgataaagcactctggcatctcgccttacccatgattttctccaatatcaccgttccgttgctgggactggtcgatacggcggtaattggtcatcttgatagcccggtttatttgggcggcgtggcggttggtgcaacggcgaccagctttctctttatgctgttgctgtttttacgcatgagcaccaccgggctgactgcgcaggcttatggtgccaaaaatcctcaggcattagcccgtacgctggtgcaaccgttgctgttggcgttgggggctggggcgttaattgcgctgctgcgtacgccgattatcgatctggcgctgcatattgttggcggtagtgaggcagtcctggaacaggcgcggcgctttcttgaaatccgctggttaagcgcaccggcgagcctggcgaatctggtattactcggttggttactcggcgtgcaatatgcccgtgcgccagtaattttgttagtggtcggcaatatcctcaacattgtgctggatgtctggctggtgatggggctgcatatgaacgtgcagggcgcggcgctggcgacggttattgcggaatatgcaacattgctgattggtctgctaatggtgcgtaaaatcctcaaactacgcggaatttccggcgaaatgctgaaaactgcctggcgaggaaacttccgtcgcttgctggcgcttaaccgcgatatcatgctgcgtagcctgttgttgcaactctgtttcggcgcgatcaccgtacttggcgcgcgactggggagtgacattatcgctgttaacgcggttctgatgacgctactcacctttaccgcctatgcgctggatggttttgcctacgcggttgaagcgcactccggtcaggcatacggtgcgcgcgacggtagccagttgctggatgtctggcgggcagcgtgccgccagagcgggatcgtagcgttactgtttagcgtggtttatttgctggctggggaacacatcattgcgttactgacgagcttaacccagattcagcagctggctgaccgctatcttatctggcaggtgattttgccggtggttggcgtctggtgttatctgctggacggcatgtttataggcgcaacgcgtgccaccgaaatgcgtaacagtatggcggtggccgccgcaggttttgcgctgacgctccttacgctgccgtggctgggtaatcatgctttgtggctggcattaaccgtctttctggcgttgcgcgggctttctctggcggctatctggcggcgtcactggcgcaatggtacctggtttgccgcaacgtgacggttaaaaattctgaataaataatcctaagccaaattgctgactacacttaatctcacgttcagaagaaaagtgaacgtactctcattcacaacctaacgatgaggtcttgattatgaataaagatgaagccggcggtaactggaaacagtttaaaggtaaagtgaaagagcaatggggcaaactgaccgatgatgatatgacgatcattgaaggtaaacgtgatcaactggtcggtaaaatccaggaacgttatggttatcagaaagatcaggcagaaaaagaggtcgtggattgggaaacccgcaatgaatatcgctggtaattaatccctcctgcccgacgtgtacaaggatgtacgccctcttaacgcggtttctttttcacctgcacagagtgatcatgctggcactgttcaggatgacgacacgcttccacttctacacatgccgcacagagcccatgtgcttcaatcacattatgccgcagggcaaaccccatttttgccgccagcgtatgcataatgtcttccacgccttctgcacactcttctttcactgcgccgcagcgatcgcaaataaacatggcactcgtatgggtgggctgatcgaacagatgacagagcacataactgttggtggattccaccttatgcacaaaaccttgctcaagcagaaaatccagcgcgcgataaaccgttggcggcttggcttgcggttcagcttcgcgcagtaaatcaagcagatcataagcgctgatagcgccatcctgcagactcatcaggcgcaacacttccaggcgctgtggggtcaggcgcacattacgctgcgcgcagattttttcagcctgcgctaataactcctgcgttgtggtcttttccatcgggcacctcaaagtgggggttaagaatgtccttactttaccatgttccaggaaaaacaccgagaacccttattgttgccgtaatgttgattttctgctttgtaggtaaggtgttatgttgccttgtcgtaccattatcaacacgataataattaataattcatttttaaataaattgcttcaagttaactcgctatttatttaactgggtttaaacgcatacctgtagttcagaaattatgagcgatttttgatagtgaccagatggcaaaagaattataaggaggacacggtacgacaaaaaaggtagatgaatcatgttgaagataatacccggtgcaactggatactttaataaaacactcaatagtaatcaattcgataatgaagatgcaatcaaagataaattagataatagaggtagtatcaaaggtaaattaaataatatatatggtaaatctattgattatgcagcgctgcgtcatcgggatataattattgcaaaaatagatttgtttattcaacgaatcacgcataatttatggcatgcacgtaaaaaaatgtgtttttaattgtgcaaataaatgatctcaaaatgtgggtcaataagtatattgacgattgcactgatgaggatttaaacgatcgtgactttattgcaagtgttgttgaccgggctatttttcatttcgcgattaatagtatatgtaatcctggggataataaagatgcaatgcccattgaacaatgtacttttgatgtagaaactaagaatgaccttccctccacggttcagctattttatgaggaatctaaggataatgaacctttagcgaatatacattttcaagcaataggttctggttttttaacgtttgttaatgcctgccaggaacatgatgacaacagcttaaaattatttgctagcctgttaattagtcttagttattctagtgcctacgcagatttaagtgaaacagtgtatattaatgaaaataatgagagctacctgaaagctcagtttgaaaaattatctcaacgtgatatgaagaagtacctgggagagatgaagcgtctggctgatgggggagaaatgaattttgatggctatctggataagatgagtcatctggtgaatgaaggaacgctcgatcctgatattttaagcaaaatgcgagatgctgcaccacaattaattagcttcgcgaagagctttgacccaaccagtaaggaagagattaaaatacttacagacacttctaaattaatttatgatttgttcggggttaaaagcgagaaataatatgtgaagttcttcgatagtatggaaggcattatataaaaggacccaatatttattgggttcttttttctctatcaatactattagcagggagatatatcaccagagtttaatgtgtgattttttatttatcgtcgaacctggattgtttatcattggccttaacaaagttaacggctaataagattatttccatcacttcgtgagagcttcatgccttgagaggatctcaattttcttttgcaatgagacaggcgcttcctgttgttatggtatagtaccccgctattgagcctcctgaatagtgatgctgaataacataaccccatgatatatcgataaaataatctctacatttgaaaatgcacggtaattctgaaatgcaaaaaatcaaccaaaccagcgcaatgcctgaaaaaactgacgttcactggagtggtcggtttagcgttgcaccaatgctcgactggacggacagacattgccgctatttcttgcgtctgctttcccgcaatacgttgctgtataccgaaatggtgaccacaggggcgattattcacggtaaaggtgattatctggcgtacagtgaagaagaacatccggtagcgttgcaactgggcggtagcgatccggcggcgctggcgcagtgtgcaaagctggcagaagcgcgcggatatgatgagatcaacctgaatgtcggctgcccgtctgaccgggtgcagaacggcatgtttggtgcgtgtctgatgggtaatgcgcagctggttgccgactgcgtgaaagcgatgcgcgatgtggtgagcattccggtgacggtgaaaacgcgtattggcatcgacgaccaggacagctatgaatttctctgcgatttcatcaataccgtttccggcaaaggcgagtgtgagatgttcatcatccacgcacgtaaagcctggcttagcgggttaagcccgaaagaaaaccgtgaaatcccgccgctcgattatccgcgtgtgtatcaactgaagcgtgactttccgcatctgacaatgagcattaacggtggtatcaagagcctggaagaggccaaagcacacctgcaacatatggatggcgtgatggtcgggcgcgaggcgtatcagaatccgggtattctggcggcggtagaccgggagatctttggttccagcgataccgatgccgatccggtggcggtagtgcgcgccatgtatccgtacattgagcgtgaactcagccaggggacgtatctcggccatattacccggcatatgttgggcttgttccagggtattcctggcgcgcggcagtggcggcgttatttaagtgaaaatgcccataaagcgggtgcagacattaatgtgctggaacacgcgctcaaactggtggcggataagcgttaacttttcaccaaaaagtagtcaaattcaccacgccctgcgcaccgtcgcggggcgttttgctgttaaatcaatagattatttttggcatgattcttgtaatgccagcaagagatttcatatttgggagagcatcatgctggaactactttttgtgattggcttttttgtcatgctgatggtcaccggcgttagcttgctgggcattatcgccgcgctggttgtggcgacggccattatgttcctcggcggtatgctggcattgatgattaagttgctgccgtggttactactggcgattgcggtggtgtgggttattaaggcgattaaagcaccaaaagtgccgaaatatcagcgttatgaccgctggcgttactaagggattgtgcggatgatcacaacctaaggttttatccttagaacaaaataggaattgataatcaaatctgtcactattgcgcctctaacagattcatcgtgctgtaccctacatacagccgaactataaaaagaaagggcttcccaggtggaagccctatttcttttatggaatcagcaggctggaaccttgcgtcgcccggctttccagaatctcatgcgcacgctgcgcatccttcagcggatatttctgctgctcggcgacatcgaccttaatcacaccgctggcaatcaaagagaacagttcattactggcctcggttaattcctcccgcgtggtgatatagccttgcagggaagggcgtgtcacatacaagctgcctttttgattgagaatgcctaagttcacaccggtaaccgcaccactactgttgccaaaactgaccattaagccgcggcgttgcaggcaatccaggctccgttcccaggtgtctctgcccacggaatcgtacaccacgcgcactttcttaccgccggtgatctcttttaaccgctcgaccagatcctcttcacgatagttaataacctgccacgcgcccgcttttagcgcgctctgcgctttttgcgcggttcctacggtgccgataagtttcgcgcccagggcttttgcccactggcaggcaattaagccaacgccgccagccgctgcgtggaacaggaactgttcatcgggtttaatttcataggttttgcgcagcagataataaaccgttaagcctttcaggaaggatgccgcagcttgctcaaaagaaattgccgcaggcagaatcgccgctttatccgcaataatgttatgcacagagctgtaagcgcctaacgcgctctgcgcatagactacacgatcgcctgccttaatatgctttacaccactgccgactttactcacgatgcctgctgcttcggtgcctaatccgctgggtaggcttggcggcgggtaaaggccgctgcggatatatgtgtcgataaaattgatgccgatggctttattttcgacctggatttcattctccgccggatcggcaggagtgaactctacggcttgaagtacttccgggccaccgtgcttgtgaaattcaattcgtgttgccatgtgtcctccagaacgtatcgtcagggtctgcttcatatgataaagtttcgacccattctttatctcggtaactccattcactatggcaggaaataaacccttcaacaaacagcaggctgaaccccgcgaacgcgatccacaagttgccgggctgaaagtgcctccgcacagcatcgaagcggagcagagcgtgttgggcggtttaatgctagataacgaacgctgggatgatgtagccgagcgtgtggtagcagacgatttttacacccgcccacaccgtcatatctttactgaaatggcgcgtttgcaggaaagcggtagccctatcgatctgattactcttgcggaaagcctggaacgccaggggcaactcgatagcgtcggtggttttgcttatctggcagagctgagtaaaaatacgccaagtgcggctaacatcagtgcctatgcggacatcgtgcgtgaacgtgccgttgtccgtgagatgatcagcgttgcgaatgagattgccgaagctggttttgatccgcaggggcgtaccagcgaagatctgctggatctggctgaatcccgcgtctttaaaattgccgaaagtcgtgcgaacaaagacgaagggccgaagaacatcgccgatgtgctcgacacaaccgtggcgcgtattgagcagttgtttcagcagccacacgatggcgttaccggggtaaacaccggttatgacgatctcaacaaaaaaaccgctggcttgcagccgagcgatttgatcatcgtcgccgcgcgtccgagcatgggtaaaacaacatttgcgatgaacctcgtcgaaaacgcggcgatgttgcaggataaaccggtacttatcttcagcctggagatgccaagtgaacagatcatgatgcgttctctggcgagcctgagccgcgttgaccagactaaaatccgtaccgggcagctcgatgacgaagactgggcgcgcatttccggcaccatgggtattttgctcgaaaaacgcaatatctatatcgatgactcctccggcctgacgccaacggaagtgcgttcccgcgcacgccgtattgcccgtgaacacggcggcatcgggcttatcatgatcgactacctgcaactgatgcgcgtaccggcgctttccgataaccgtacgctggaaattgcagaaatctctcgcagcctgaaagcactggcgaaagaactgaacgtgccggtggtggcgctgtcccagttgaaccgttctctggaacaacgtgccgacaaacgcccggtcaactccgacctgcgtgaatctggctctatcgagcaggatgcggacttgatcatgtttatctatcgtgatgaggtgtatcacgaaaacagtgatttaaaaggcatcgcggaaattattatcggtaaacaacgtaacggcccaatcgggacggtacgcctgacctttaacggtcaatggagccgcttcgacaactatgcggggccgcagtacgacgacgaataataattattttatgaattaggtaattaaagcaaacacttatcaaggaacacaaatgcaagcggcaactgttgtgattaaccgccgcgctctgcgacacaacctgcaacgtcttcgtgaactggcccctgccagtaaaatggttgcggtggtgaaagcgaacgcttatggtcacggtcttcttgagaccgcgcgaacgctccccgatgctgacgcctttggcgtagcccgtctcgaagaagctctgcgactgcgtgcggggggaatcaccaaacctgtactgttactcgaaggcttttttgatgccagagatctgccgacgatttctgcgcaacattttcataccgccgtgcataacgaagaacagctggctgcgctggaagaggctagcctggacgagccggttaccgtctggatgaaactcgataccggtatgcaccgtctgggcgtaaggccggaacaggctgaggcgttttatcatcgcctgacccagtgcaaaaacgttcgtcagccggtgaatatcgtcagccattttgcgcgcgcggatgaaccaaaatgtggcgcaaccgagaaacaactcgctatctttaataccttttgcgaaggcaaacctggtcaacgttccattgccgcgagcggtggcattctgctgtggccacagagccattttgactgggtgcgcccgggcatcattctttatggcgtcagcccgctggaagatcgctccaccggtgccgattttggctgtcagccagtgatgagtctaacctccagcctgattgccgtgcgtgagcataaagccggagagcctgttggttatggtggaacctgggtaagcgaacgtgatacccgtcttggcgtagtcgcgatgggctatggcgatggttatccgcgcgccgcgccgtccggtacgccagtgctggtgaacggtcgcgaagtaccgattgtcgggcgcgtggcgatggatatgatctgcgtagacttaggtccacaggcgcaggacaaagccggggatccggtcattttatggggcgaaggtttgcccgtagaacgtatcgctgaaatgacgaaagtaagcgcttacgaacttattacgcgcctgactagtagggtcgcgatgaaatacgtggattaatcgttctgtaatatttgattgtctgtgccggatgcggcgtgaatgccttatccggccaataaaatcctaaaaattcaataagttgatgttctttcatgctcttataaaggtcgtgcctctggcggatgtacgtttgtcatgagtctcactctgttgctaattgccgttcgctcctgaacatccactcgatcttcgccttcttccggtttattgtgttttaaccacctgcccgtaaacctggagaaccatcgcgtgtttcaaaaagttgacgcctacgctggcgacccgattcttacgcttatggagcgttttaaagaagaccctcgcagcgacaaagtgaatttaagtatcggtctgtactacaacgaagacggaattattccacaactgcaagccgtggcggaggcggaagcgcgcctgaatgcgcagcctcatggcgctagcctttatttaccgatggaagggcttaactgctatcgccatgccattgcgccgctgctgtttggtgcggaccatccggtactgaaacaacagcgcgtagcaaccattcaaacccttggcggctccggggcattgaaagtgggcgcggatttcctgaaacgctacttcccggaaagtggcgtctgggtcagcgatcctacctgggaaaaccacgtagcaatattcgccggggctggattcgaagtgagtacttacccctggtatgacgaagcgactaacggcgtgcgctttaatgacctgttggcgacgctgaaaacattacctgcccgcagtattgtgttgctgcatccatgttgccacaacccaacgggtgccgatctcactaatgatcagtgggatgcggtgattgaaattctcaaagcccgcgagcttattccattcctcgatattgcctatcaaggatttggtgccggtatggaagaggatgcctacgctattcgcgccattgccagcgctggattacccgctctggtgagcaatagcttcagcaaaattttctccctttacggcgagcgcgtcggcggactttctgttatgtgtgaagatgccgaagccgctggccgcgtactggggcaattgaaagcaacagttcgccgcaactactccagcccgccgaattttggtgcgcaggtggtggctgcagtgctgaatgacgaggcattgaaagccagctggctggcggaagtagaagagatgcgtactcgcattctggcaatgcgtcaggaattggtgaaggtattaagcacagagatgccagaacgcaatttcgattatctgcttaatcagcgcggcatgttcagttataccggtttaagtgccgctcaggttgaccgactacgtgaagaatttggtgtctatctcatcgccagcggtcgcatgtgtgtcgccgggttaaatacggcaaatgtacaacgtgtggcaaaggcgtttgctgcggtgatgtaatgcaggaaagcaggctggagctacccagcctgcagtgaaattaaactgtcgtcgctttcactctttctttatagatgatttttttgatgccatcgttctacgtgagagataataaacgttgttagttcttttattgttaagcttatcccaattatctggaattccttatcctgtttttttgggtggagtaataatttctgcacatctaaccattattaaatttaataataagtatcgggtttgttacgatagaatatttctatatcctcaagaatatgctttgccttattgcctgtgactttctgagattcaattatagtatcgttaaattctaatgttaaagagaactcttttttccgctttgtgtaagtttaaccttatattgattaccaatatcaaataaaaaggtcctgtaatgagaataatcacctttaacctcctcggcaaaacagcaaagcgtgcaaatatacataaagtctttcttacccctgattttgttaactaaatcaataaatgcgtgaaaaactttacttgcaatagaacttgatacttcttctccaggtctaaaaaatcttttgcaatttttaactgtgtttctatgtataaaaagaaatctttggcataagagatatctttattatttagtgcatctagctcaacaggtaaagatgtcgttttgttgctattcacatatgatatattcatatcatcatctccatcgcgagtaataaaattaatcaccattgtagggtagggggctggtcaatcagaaatcatctttataaacttcgattgtttttgtaatgctgtatcattaagttcattaaatcgtacagcagataaatgttctatcaaatttcgctcatttgccgaggattcatcataataaacgtaaaattaatgtatccttacatcgagtaataaacattttttatacaaaaaaagacaggaacgtatttactgggttaaatataatcatcctgcttttcatcacaaaaaccgcagataatccttcctttccccggcagctggcgttatggtcagatggtttttgcaacaaatctcacaataaaaagtttcaacatactgactatttagggaaaaatatgcgcaagatcacacaggcaatcagtgccgtttgcttattgttcgctctaaacagttccgctgttgccctggccagttctcctagtccgcttaaccctgggactaacgttgccaggcttgctgaacaggcacccattcattgggttagcgtcgcacaaattgaaaatagcctcgcagggcgtccgccaatggcggtggggtttgatatcgatgacacggtacttttttccagtccgggcttctggcgcggcaaaaaaaccttcagcccagaaagcgaagattatctgaaaaatcctgtgttctgggaaaaaatgaacaatggctgggatgaattcagcattccaaaagaggtcgctcgccagctgattgatatgcatgtacgccgcggtgacgcgatcttctttgtgactggtcgtagcccgacgaaaacagaaacggttagtaaaacgctggcggataattttcatattcctgccaccaacatgaatccggtgatctttgcgggcgataaaccagggcaaaatacaaaaagccaatggctgcaggataaaaatatccgaattttttatggcgattctgataatgatattaccgccgcacgcgatgtcggcgctcgtggtatccgcattctgcgcgcctccaactctacctacaaacccttgccacaagcgggtgcgtttggtgaagaggtgatcgtcaatagtgaatactgacagagcgggagagcgtgatgctctcccgaatgctgtttttttaatcacacctttatcctttcgctgtcttgctgcaaactgattaagagagttttatcaaggagcagcacatgtggtatcaaaagacgctcacgcttagcgccaaatctcgtgggtttcatctggtaacggatgaaattctgaatcagctggctgatatgccgcgcgttaacatcggcttactgcatctgttgctgcaacatacctccgcctctctgacacttaatgagaactgcgatcccaccgtacgccacgacatggagcgttttttcctccgcaccgttcccgacaacggaaattatgagcatgactatgagggagcagacgatatgccttctcatatcaaatccagtatgctgggaacaagccttgtattgccggtgcataaagggcgtattcagaccggcacctggcaaggcatttggctgggggaacatcgcatccacggcggaagccgtcgcatcatcgcgacactacaaggggagtaaaaaatgaccattagcgagttgctacaatattgcatggcaaaaccaggcgcagaacagagcgtgcataatgactggaaagcgacgcagatcaaagtggaagatgtactgtttgcgatggtgaaagaagtagaaaatcgcccagctgttagcctgaaaaccagcccggagctggcggagctgctacgtcagcagcacagcgatgtgcgtccaagccgccatctgaataaagcgcactggagcaccgtgtatctcgacggtagcctgccagatagccaaatctattatctggtggatgcgtcttatcagcaggcggtgaatttactgccggaagaaaaacgtaaattgctggtgcaactctgaaaggaaaaggccgctcagaaagcggccttaacgattacagcatcggcttaaggaagcgtgccgtgtgacttgcttcgcactccgcgacggtttctggcgtaccggagacgaggatctcgccgccaccactgccgccttctggtcccaggtcgacaatccagtcagcggttttgatcacgtcgagattgtgctcaatcaccacaatggtgttgccctgatcgcgcagtttatgcagtacgtcgagcagttgctgaatatcggcgaagtgcagaccggtggtcggctcgtcgagaatatacagcgtctgcccggtgccgcgtttactcagttcacgcgccagcttcacgcgctgggcttcaccgccactaagggtggttgcggactgccccagtcgaatgtacgtcaggccaacgtccatcaacgtttgcagcttacgcgccagtgcaggtacggcatcaaagaactcacgcgcctcttcgatggtcatatccagcacttcgtggatggttttgcctttgtacttaatctccagcgtttcacggttatagcgtttacctttgcactggtcgcacggcacgtagatatccggcaggaagtgcatctccactttgatcacgccatcgccctgacaggcctcgcagcgtccgccacgaacgttaaagctgaaacgtcccggcgtatagccgcgcgcacgggattccggtacgcccgcaaacagttcgcgcacaggcgtaaacacgccggtataggtcgccgggttagaacgtggagtacgaccaattgggctttggtcgatatcgatcactttatcgaaatgctccagcccctgaatatcgcgatacggtgctggttcggcgatggtcgccccattcaactggcgttgggcaatcgggaacagtgtgtcgttaatcagcgtgcttttaccggaaccactaaccccggtgatgcaggtaaacagacccaccggcagcgtcagcgtcacgtccttcaggttgttgccgcgtgcgcctgtcagcttcagcactttttccggattcgccggaacgcgtttcttcggcacttcaatcttgcgtttgccgctcatgtactgcccggtcaagctctccggcaccgccataatcgcttccagcggaccttctgcgaccacttcaccgccgtgaacacctgcgcccgggccaatgtcgatcacatggtcagcggcgcgaattgcgtcttcgtcgtgctccaccacaatcacggtattaccgagatcgcgcagatggataagcgtacccaacaggcgctcgttatcacgctggtgcaggccgatagacggctcgtccagcacgtacataacgccaaccaggcccgcaccaatctggctcgccagacggatacgctgtgcttcaccgccagaaagcgtttctgcgctgcgggaaagcgtcaggtaattcaggccgacgttaacgaggaatttcagacgatcgccgatctctttaaggattttttctgcaatcttcgcccgctgacctgcgagtttgagattgttgaagaattccatcgcatgaccaatgctcatgtcggagatagcaggcagcggcgtattctcgacatacacgtggcgcgcttcccgacgcagacgcgtcccttcgcagctggcgcacggacgattactgataaacttggctaattcttcgcgtaccgcgctggattccgtctctttatagcggcgctccatattatgcagcacgccttcgaacggatgacgacgaatggaggtatcgccacgatcgttcatgtatttgaattcaatgttttctttgccagaaccgtacaacaccactttatgcacgttcgcgctcaggctgccccacggcgcttcgacgtcgaacttatagtgatctgccaggcttttcagcatctggaaataatagaagttgcggcgatcccagccacggatcgcaccaccagccaggctcagttccggattctggatcactcgatcaggatcgaaatattgctgtacgccaaggccgtcgcaggtcgggcaggcccccgccgggttgttaaagctaaacagtcgcggctccagttcacgcatactgtagccgcaaattgggcaggcgaagttggcggagaacagcagctcttccgctttcgggtcgtccatatccgccactaccgcggtaccaccggaaagctccagcgcggtttcaaaactctcggcaagacgttgggtaagatcgtcacgcaccttgaagcgatcaaccaccacttcaatggtatgtttcttttgcagttccagttttggcggatcggaaagatcgcagacttcgccatcaatacgagcacggatgtagccctggcttgccaggttctccagcgttttggtgtgttcgcctttgcgctctttaatgattggcgcgagtagcatcagacgcttgccttccggctggctcagcacgttatccaccatctggctgacggtttgcgccgccagcgggacgtcgtggtccggacagcgcggctcgccaacgcgggcgaataacaaacgcaaatagtcgtggatttcggtgattgtccccaccgtagaacgcgggttatgagacgtgcttttctgctcaatactgatggcaggagaaagcccctcaatatgatcgacgtccggcttttccatcagactcagaaactgccgcgcgtaggcggaaagggattcaacgtaacggcgctgcccttcggcatataaggtgtcgaaagcgaggctggatttgccagaaccgctaagcccggtcacgacaatgagcttgtcgcgggggataacgaggttgatgtttttgagattatgggtgcgggcgccccgaacttcgatcttatccattcacctttcccggattaaacgcttttttgcccggtggcatggtgctaccggcgatcacaaacggttaattatgacacaaattgacctgaatgaatatacagtattggaatgcattacccggagtgttgtgtaacaatgtctggccaggtttgtttcccggaaccgaggtcacaacatagtaaaagcgctattggtaatggtacaatcgcgcgtttacacttattcagaacgatttttttcaggagacacgaacatggccagcagaggcgtaaacaaggttattctcgttggtaatctgggtcaggacccggaagtacgctacatgccaaatggtggcgcagttgccaacattacgctggctacttccgaatcctggcgtgataaagcgaccggcgagatgaaagaacagactgaatggcaccgcgttgtgctgttcggcaaactggcagaagtggcgagcgaatatctgcgtaaaggttctcaggtttatatcgaaggtcagctgcgtacccgtaaatggaccgatcaatccggtcaggatcgctacaccacagaagtcgtggtgaacgttggcggcaccatgcagatgctgggtggtcgtcagggtggtggcgctccggcaggtggcaatatcggtggtggtcagccgcagggcggttggggtcagcctcagcagccgcagggtggcaatcagttcagcggcggcgcgcagtctcgcccgcagcagtccgctccggcagcgccgtctaacgagccgccgatggactttgatgatgacattccgttctgatttgtcattaaaacaataggttatattgttttaaggtggatgattaaagcatctgccagccataaaaaagaagcctccgttatggaggcttctacgtatcaggtcaaaatcattggccattgtggcggtgtctgattcatctcttctatcatcacgctctcgatgttgtgccagatagcggtgatgtccgccattgtgatgccaagcaaccccattgcgaaccaacaggcggaaacaacgcccagaccgctgctgatcaccgcaagcccgacataatcagaccgacgaaaacggatgttgagtgtgctggccagaaacatcattacggcactaagaagttgccagcgaagaagaaccacgccagtggtgagggtagccatcaaacaattcctctgaaaagagccgatgccctggacagcgcggcgttgttcacgggaggcgtggtacactctggctatcgcggggcttgcagaacacaaaaatgaaacactctgtttgtttcattaattttgtgaactatatcacaattgattgtttgttagccatattaggccgtgacttttattgctgtacagattatgtggtttttcagtggcattaagggcatatcttcccgccgcctctgcattcctgtaggaaattaattttgaatatcaatgaattattttcatccaggtgacgattagaaaggtatcaatttcaaatcaggcaaaagtgctatttataccgtaagatttatctaaagacgtcggtacccagggttttcaccttgcaatggccgggtataaacaggcaggaaattgatagcaatgagtcatcgtgcacgacaccaattactggcgttgccgggcattatctttttagttctctttcccatcattcttagcctatggattgccttcctttgggcaaaaagtgaagtgaataatcagctccgaacctttgctcaactggcactggataaatccgagctggtcattcgccaggcagatttagtgagcgatgcagctgaacgctatcaggggcaagtttgcactccagcccatcaaaagcgaatgttgaatattattcgtggctatctttatattaatgaattgatctatgcccgtgataaccattttttatgcagtagcctgatagcgcctgtaaacggctatacgattgcaccggccgattataagcgtgaacctaacgtttctatctattattaccgcgatacgccttttttctctggctataaaatgacctatatgcagcggggaaattatgtggcggttatcaaccctctcttctggagtgaagtgatgtctgatgacccgacattgcaatggggtgtgtatgatacggtgacgaaaacctttttcagcttaagcaaagaggccagcgcagcaacgttttctccgctgattcatttgaaggatttaaccgtacaaagaaatggctatttatatgcgacagtttatagcacaaaacgcccaattgcagccattgttgcgactagttatcaacgtcttataacccatttttataatcatcttatttttgcgttgcccgccggtattttggggagtcttgttctgctattactctggctacgtattcgacaaaactatttatctcccaaacgtaaattgcaacgcgccctcgaaaaacatcaactttgtctttattaccagccaataatcgatatcaaaacagaaaaatgtatcggcgctgaagcgttgttacgttggcctggtgagcaggggcaaataatgaatccggcagagtttattccgctggcagaaaaggaggggatgatagaacagataactgattatgttattgataatgtcttccgcgatctgggcgattacctggcaacacatgcagatcgctatgtttctattaacctgagcgcctccgattttcatacgagtcggttgatagcgcgaatcaatcagaaaacagagcaatacgcggtgcgtccgcagcaaattaaatttgaagtgactgagcatgcatttcttgatgttgacaaaatgacgccgattattctggctttccgccaggcaggttacgaagtggcaattgatgattttggtattggctactctaacttgcataaccttaaaagtttgaatgtcgatattttgaaaatcgacaaaagctttgttgaaacgctgaccacccacaaaaccagtcatttgattgcggaacacatcatcgagctggcgcacagcctggggttaaaaacgatcgctgaaggcgtcgaaactgaggagcaggttaactggctgcgcaaacgcggcgtgcgctattgccagggatggttctttgcgaaggcgatgccgccgcaggtgtttatgcaatggatggagcaattacccgcgcgggagttaacgcgcgggcaataaaattacaggcggtggcgataatcgctgggagtgcgatcaaactgccgacggaaaacgcgggagaaggtctgctggctgacataacccaggtccattgcgatatcaaaaatcggacgctcggtggtgcgcaactcaacggcggccagtaacaggcggcgttggcgaatgtaatcgccaagcgtctgatgcgtcaccgtgcggaacattcgttgcaagtaccacttactatagccacttttttttgcgactacatcaatgttaagcggctggtcaatatgctcgtcaatccatgcgataagatcctgaataattttctgatgggacataaatctgcctcttttcagtgttcagttcgttaattcatctgttggggagtataattcctcaagttaacttgaggtaaagcgatttatggaaaagaaattaccccgcattaaagcgctgctaacccccggcgaagtggcgaaacgcagcggtgtggcggtaagcgcgctgcatttctatgaaagtaaagggttgattaccagtatccgtaacagcggcaatcagcggcgatataaacgtgatgtgttgcgatatgttgcaattatcaaaattgctcagcgtattggcattccgctggcgaccattggtgaagcgtttggcgtgttgcccgaagggcatacgttaagtgcgaaagagtggaaacagcttagctcccaatggcgagaagagttggatcggcgcattcataccttagtggcgctgcgtgacgaactggacggatgtattggttgtggctgccttagccgcagtgattgcccgttgcgtaacccgggcgaccgcttaggagaagaaggtaccggcgcacgcttgctggaagatgaacaaaactaaagcgccacaagggcgctttagtttgttttccggtctttgtctttctctctatcccgctggtacacaggagggtttcccccgacgtcaacacacctcattcgagcacgtggtggaggttccggttggtgttgatgctttaattgtatgtcaccgacgtttcttcgccagtgtaaaagtatactttttaaccgcaatatttttgtcatctcagacgattttttatcgcaatcctgaacggtatacggctcgataacgctgcaatcttgcgcaccgacgataacgtttgcgcatcaattgcctggtttttcatcgtcaagacaataaaagagaaaaaagcagcaaacttcggttgaaaaagccgctatgatcgccggataatcgtttgctttttttaccacccgttttgtatgcgcggagctaaacgtttgcttttttgcgacgcagcaaattgtcgcaaacctggagcaggaagataacgtttcgctggcaggggattgtccgccacgcatcttgacgaaaattaaactctcaggggatgttttcttatgtctacgccaagtgcgcgtaccggcggtagtctcgacgcctggtttaaaattagtcaacgtggaagcactgtccgtcaggaagtggttgccgggttaacaacgtttctggcgatggtctacagcgtcatcgtcgttccaggtatgttgggtaaagcaggcttcccgcctgcggcagttttcgttgcaacctgtctggttgccggactcggttctatcgtgatgggtctgtgggctaatctgccgttggcgattggttgcgccatctccctgacagcgtttaccgcattcagcctggtgctggggcaacatattagcgtacctgtcgcgctgggtgccgtgttcctgatgggtgtgctgtttacggtaatttctgccacgggtatccgtagctggattttgcgcaacttgcctcacggtgtggcgcacggcacggggattggtatcggtctgttcctgctgctcattgccgctaacggtgtcggtctggtgattaaaaacccgcttgatggtctgcccgttgcgctgggtgatttcgcgaccttcccggtgattatgagtctggtaggtctggcggtgatcatcggcctggaaaaactgaaagtccctggtggcattctgctgaccattatcggtatcagtattgtcggtttgatcttcgatcctaacgtccatttctccggcgttttcgccatgcctagtttgagcgatgaaaacggcaatagtctgattggcagcctggacattatgggcgcgctgaatcctgtagtcctgccaagcgttctggcgctggtgatgacggcagtatttgatgccaccggaactatccgtgccgtcgccggccaggcgaacctgctggataaagatgggcagatcatcgacggtgggaaagcactgaccactgactccatgagcagcgttttctctggcctggtgggtgcggctccggcagcggtatacatcgagtctgcggcgggtacggcggcgggcggtaaaaccggtttgacggctatcaccgttggcgtgctgttcctcctgattctgttcctctctccgctctcttacctcgttccggggtatgcaacggctccggcgctgatgtacgttggcctgctgatgctgagcaacgtggcgaaaatcgactttgctgattttgttgatgcgatggcgggtctggttacggctgtattcatcgtgctgacctgtaacatcgtaacaggcatcatgatcggcttcgcgactctggtgattggtcgtctggtttccggcgaatggcgcaagttgaacatcggtacggtcgttatcgccgtggcgctggtgaccttctatgcgggtggctgggctatctaatctttcatcggattctgaaaacgggtggcaatggctgcccgtttttattttctccgcacattgtgtgagcttttgcgatattctgaaaaaaatgagaattcaggcataacgtctttctcagatcataaaaaacatcgcaaacagggaacgcatggaaatcttcttcaccatactgataatgaccctcgtggtcagcctgtccggggtggtcactcgtgtcatgccctttcagatcccgcttccgcttatgcaaatcgccatcggtgcgctactggcgtggccgacgtttggtttgcatgtggagtttgatcctgaactctttttagtcttgtttatcccgccgttgctgttcgctgatggctggaaaacgccgacccgtgaatttctcgaacatggtcgagagattttcggcctcgcgctggcgctggtggtggtcaccgtggtcggcattggcttccttatttactgggtggtgccgggcattccgctgatccctgcctttgcgctggcggcggtgctttctccgaccgatgctgtggcgctctccgggattgttggcgaagggcgcatcccgaaaaaaatcatgggcattttgcagggcgaagcgttgatgaatgacgcctccggtctggtgagcttgaagtttgccgtagcagtggcgatggggacgatgatcttcaccgtcggcggtgcgacggtcgaatttatgaaagtagccattggcggtattctcgccggttttgtggtgagctggctgtacggtcgcagcctgcgattcctcagccgctggggcggtgatgaacccgcgacgcagatcgtcctgctgttcctgctgccattcgcttcttatctgattgccgaacatattggcgtttccggcatcctcgctgcggttgccgccgggatgaccatcacccgctccggtgtgatgcgccgtgcgccgctggcaatgcgcctgcgtgcaaacagcacctgggcgatgctggaatttgtctttaacggcatggtgttcctgctgttaggtctgcagctgccgggtattctggagacgagcctgatggcagcagaaatcgaccctaacgtcgaaatctggatgctgtttaccaatattattctgatatatgcggcgctgatgctggtccgtttcggctggctgtggacgatgaaaaagttcagcaaccgcttcctgaagaagaagccgatggagtttggtagctggaccacacgagaaatcctgatcgcgtctttcgccggggtgcgtggggcgatcactctggccggtgtgctctctatcccgctgctcttgccggatggtaacgtcttcccggcgcgctatgagctggtgttcctggcggctggcgtcattctcttcagcctgtttgtcggcgtggtgatgttgcctattctgctacaacacattgaagtcgcggatcatagccaacaattgaaagaggaacgtattgcgcgagcggcaacggcagaagtggcgattgtggcgatccagaaaatggaggagcgtctggcggcggataccgaagagaatatcgataaccagctgcttacggaggtcagttctcgcgtcattggtaacctgcgtcgtcgcgccgatggacgtaacgacgttgaaagttccgtgcaggaagagaaccttgagcgtcgcttccgtctggcggcattgcgttctgaacgtgctgaactttaccacctgcgcgccacacgggagatcagcaacgaaacgctgcaaaaattactgcacgatctcgatttgcttgaagcgttgctaattgaggaaaatcagtaagccgaaagcgacgtaaccaggcccgaggtaatctgaaaaaggtgcaatcttttgcacctttaacaggttagctcgggctaacattcatgattctaaaacaaataaattatctctcttttaaagtcaattcattggctgttcttcgacttaacctcaatctgcatcttgcataatatctgcagtaatcttcatagcgactgcatgaagattatcctcagtttgactcatgccagtatgagtggcacaatcttcttcaaagaatttctgtagtgttaccaggatatcactattaatggagatattttcctcaccacggagaatggtaatacccattccctggacgctagcctcatcgaaattaacacgatagagacggatattaaacatccaggcttttgttaaaacagaacagttgaaatggcaattgcttaaattggcattattaaaattaacattagccatattagagtcggtacatataaccatttcgaggaacgtatttgttaaccgcgtaaaaaagagtttgctatcaattaagtttatattctggagggttgctttattcaggttgacacgagacagatcagcatgttcaaagttaattaaatcaagtttagagaagctaaggtcggctctaaataaattaatatatggcgctattactttataaagatttacctcagccatgtatgccatataaaaattactataatcaaggaaggtatttttaatattggctctattcattgttgcattgtagaattgaacatgcatagcggaacaactatttagagttccgtcagtcatttttatctgagcgaaattactgtcatcgagaatacaattatcaaaaagtattttttccattatggcgaaattaaaattcgttttatacatattacagtcctgaaaaatagcgttttgtagtctgcaacctgcaaaattgctattggataaatcttcatctttaatcacgatacctttcaggctaaggtgactaaaatcgtaaccaccatttactgtctgtgggatttcgatagtattattatggacggtgacattatttataaaatataccaccttaatactcacttccttatctttattaaggtaaactcttctcgtaattctatcgtcacatttattatttgcatgactagctatatctataaaatatttatgtattttcctgtccgtttctttcgtgatttttccacttggtaaactatcataaattcttttcattttctgaatcaagcctatcactttttcatgatcatccattttgaaaagagagagggctttattgtcaattaacgtgtttttatgatgtttgctgtaattatcactttttgttttctttgtatgacttggacttgtgacagagtggttatcgttaatcaggcaaagagggaaaaacatattatttaaaccattatagcgcataaaatatccttataattaacaagaaagaaaaggcatattctctgcattatcattttctacgactgtcaaaaatcgctcattttttaatgagtttatttgtttaatattatgggaaaaggtgatgcatttgggagaggaagagtattccccggtcagacgaccggggaaggggagagattaatgcgcgcggccttgctcaacgccaaagccggtctgggagcggataaactgcgcgcggaacagttcacgctcacgcgcgccttccgcactgttatcggttgcgctgaagaaccagatgccgaggaatgccacggtgatagagaacagcgccgggtattcatacgggaagatggctttttcgtgaccaaggatctgtacccaaatcgtcgggccgaggatcatcagtactactgcggtaatcagccccagccagccacccatcatcgcgccacgcgtggtcagtttgctccagtacatagaaagcagaatgatcgggaagttacagctcgccgcgatggcaaacgccagccccaccataaaggcgatgttctgattctcaaacagcacgccgaggataatcgcaatcacgccgaggatcagtacggtgattttacttacccgcagctcttcacgttcggtcgcgccttttttgaagacgttagcgtacaagtcatggctaaccgcggatgcgcccgccagcgtcagacccgcaaccaccgcgaggatagtggcgaaagcaaccgcactaataaaaccgaggaacaggttgccgcccactgcattcgccaggtgaacggccgccatgttgttaccaccaatcagatggcccgccgcgtctttatattccggattcgcaccaaccagcatgatcgcgccgaagccgataataaaggtcagaatatagaagtagcccataaacccggtggcgtagaacacgctcttacgtgcttcgcgggcatcgctgactgtaaagaagcgcatcagaatgtgcggcaagcccgccgtaccaaacatcagtcccagacccagagagagcgcggagatcggatctttcaccagcccgcccggcttcatgatgtcgacacctttcgggtgtaccgccatcgcttcactgaacagattgttgaagctaaagccgacgtgtttcatcaccataaaggccataaagctggcaccgaacagcaacagcacggctttgataatttgcacccaggtggtcgccagcatgccgccgaacaggacgtacatcatcatcagcacgccgaccagcaccaccgcaatgtgatagttaaggccaaacagcagctcgatcagtttacctgcgcccaccatctgggcgataaggtaaagcgccaccaccaccagagaaccacaggcgctaagaatacgaatcggcccttgtttcagacggtaagaggccacatcggcaaaggtgtagcgccccaggttacgcagacgttcggcaatcaggaacaaaatgatcggccagcccaccaggaagcccaggctgtaaattaagccgtcatagccggaggtaaacaccagcgcggagatccccaagaaactggcggcggacatatagtccccggcaatcgccagcccgttctggaagccagtgatattgccgcctgcggtgtagtagtcgctacgagaacgtacgcgtttacttgcccagtaggtaatgccgagcgtaaacacgacgaaaatcaggaacataataatcgcctgccagttcgttggctggcgctctacggccccgctaatagcatccgcggcgttagctgcgaaagggagtgtggcggcaagcgccgtcagaactcttttcatgatgcttgtacctcatgcagttatttcaacttgcttgtacctcatgcaggacttcattattaagacggtcgaattcgccgttcgcccgccagatgtagataccggtgagaacaaaggagatcacaatcactccaacaccaattggaataccgcgtgtgacgctggtgttcggattcagcggcgtgcccagccagccgggcgcgaaggcgatcagtaaaataaagccgatataaactgccagcataataatgctcaggatggtggcaaaccgttgccgtttttcgactaactccctgaaatgcgcattgtcttctatccgctgataaatagtgccattcatcacagattctccagaggtaatgtagggattgttttaattcccgctcccttatgggagaaggttaacgctcgggtaacccttgccgaatgtaggccggataaggcgtttacgccgcatccggcaatcaatgcctgatgcgacgctgtcgcgtcttatcaggcctacaaaccgttaccgactcgcatcgggcaattgtgggttagcttggcatcgcgatagcctgcttctcttcaagcagcttctcgactacgccaggatcggcaagcgtgctggtatcgcccaggttgctggtatcgcccgccgcaattttgcgcagaatacggcgcataattttgccggagcgggttttaggcagggagtcggtccagtgcagcacgtctggcgtcgccagcgggccaatctctttacgcacccagttgcggacttctgcgtacagttctggactcggttcctccccgtgattaagcgtgacgtaggcgtagatcgcctgacctttaatattgtgcggaatacctactacggcggcttcggcaatcttcggatgcgccaccagcgcgctctcaatctctgccgtccccagacggtgaccggagacgttcagcacgtcgtccacacgcccggttatccagtaatagccatcttcatcgcgacgcgcgccgtcgccgctgaaatacatatttttgaaggtggagaagtaggtctgttcaaaacgttcgtgatcgccaaacagcgtacgcgcctgacccggccaggagtcggtgattaccaggctaccttcggtggccccctccagcgggttaccttcgttatcgaccagcgccggttgcacgccgaagaacggacgtgttgcgctaccggctttcagctcggtagcgccaggcagcggggtgatcatgaaaccgccggtttcggtctgccaccaggtatcgaccaccggacatttctcgttgccgatttttttccagtaccactcccacgcttccgggttaattggctcgcccacggaaccgagaatgcgcaggctgctacggtcggtgccttcgatcgctttatcgccttccgccatcagcgcgcggatcgccgtgggtgcggtatagagaatattgacctgatgcttgtccaccacctgcgccatacgggcaggcgtcggccagttgggtacgccttcaaacatcagcgtggtcgcaccgcaggccagcgggccgtacagcaagtaactgtgtccggtcacccagcccacatcggcggtgcaccagtagatatcacccggatgataatcaaagacatatttaaaggtcagcgccgcgtacaccagataaccgccggtagtatgcagcacaccttttggcttaccggtagaaccggaggtgtagagaataaacagcggatcttcggcgttcatctcttccgcctggtgctgatcgctcgcttgctcaaccaggtcgtgccaccacaggtcgcgcccttcctgccagtcaattttcccgccagtacgcttcagtaccaccacatgctctacgctggtgacgttcgggtttttcagcgcgtcatcaacgtttttcttcagcggaatactgcgcccggcacgcacaccttcgtcggaagtgatcaccagtcgactgttggaatcaataatgcgcccggcaacggcttccgggctgaagccgccgaaaatcacgctatgcaccgcgccaatgcgggcgcaggccagcatcgcaaccgcggcttccggcaccatcggcatataaatcgccaccacatcaccttttttaatgcccagctcgagcagggtattggcgaagcggcagacgtcgcggtgcagctctttatagctgatatgtttgctctggctggcgtcgtcgccttcccagatgatggcggtacgatcgccgttttcttgcagatggcggtcaaggcagtttgccgccagattcagcgtgccgtcctcgtaccatttaatggacacattaccgggggcaaaggaggtgtttttcaccttctggtaaggtttgatccagtcaagaatttttccctgttcgccccagaaggtatcaggtacgttaatagattgttgatacatcgcctcgtactgctgagggtttatcaggcaacggtctgcgatgttggcaggaatggtgtgtttgtgaatttggctcatgcttttgttctccttgtaggatgttaataatatgtggcataagcgttaaatgtaggggtattggcagttttgtttagtatttgggcgacagatcacgcaaaagtagaattgtgcaaataaacggcagggtaatttttgaaggtcagcaacaaaagttgattaattctttgaggaacatgcagttatgcatgctgttgaaaaagaggaagatactgactaactctaaagtggtattttacatgcacttacaattgattaaagacaacattcacagtgtggttatttgttacacataggggcgagcaatgtcatgacagtgtaggtgcggttactgtcgtgaaaaacaataaaaaccgccattgcaacaatggcgcaattcggatgaagcccctatgacaaggataaaaataaacgcacgccgtatcttcagcttattgattccttttttctttttcacttctgttcacgctgaacaaacggctgctcccgcaaaacctgtaactgtggaagcgaagaatgaaacctttgccccgcagcatcccgatcaatatctctcctggaaagccaccagcgaacagagtgagcgtgttgacgccctggcggaagatccacggctggtgatcctgtgggcggggtatcccttcagccgcgattacaacaagccgcgtggacatgcttttgctgtgaccgatgtgcgtgaaaccctgcgtaccggtgcgccgaaaaacgctgaagatggtccgctaccgatggcatgctggagttgtaaaagcccggatgtggcgcgtctgatccagaaagacggcgaagatggctacttccacggtaaatgggcgcgcggcggtccggaaatcgtcaacaacttaggttgtgccgattgccataacaccgcctctccagagttcgccaaaggcaaaccggagttaaccctttcccgtccgtatgcggctcgcgcgatggaagccattggtaaaccttttgagaaagccggacgtttcgaccagcaaagcatggtttgcggtcagtgccatgtggagtattacttcgacggcaaaaacaaagcggttaaattcccgtgggatgacggcatgaaagtcgaaaatatggagcagtattacgacaaaattgccttctctgactggactaactccctgagcaaaacgccaatgctgaaagcgcagcacccggaatatgaaacctggacagcgggcattcacggtaaaaacaacgtgacctgtatcgactgccatatgccaaaagtgcagaacgccgaaggcaaactctacaccgaccataaaattggtaatccgtttgataacttcgcccagacttgtgcgaactgccatacccaggacaaagctgccttgcaaaaagtggtcgcggaacgtaagcagagcattaacgacctgaaaatcaaggttgaagatcaactggttcacgctcacttcgaagcgaaagcagcgctggatgcaggcgcgacggaagctgaaatgaagccaattcaggacgatatccgtcatgcccagtggcgctgggatctggcgatcgcttcccacggcattcatatgcacgcaccggaagaaggtttacggatgctcggtacggcgatggataaagcggcggatgcacgcaccaaactggcgcgcctgctggcgaccaaaggcatcacccatgaaatccagatcccggatatcagtaccaaagagaaagcccagcaggccattggcctgaacatggaacaaatcaaggccgagaagcaggacttcatcaaaacggtgatcccgcagtgggaagaacaggcacgtaaaaacggtctgttaagccaataaccccgttccgcctcgcaaggggcggaaaacacaatggagtgaatatgagcgtattacgtagcttattaactgccggggtgctggcgagcggcctgttgtggagcctgaacggaattaccgctacccctgcggcgcaggcatctgatgatcgctacgaagttacccagcagcgtaacccggatgccgcctgtctggactgtcataaaccagataccgaaggtatgcatggaaaacatgcttccgttatcaacccgaataacaaactgccggtcacctgcaccaactgtcacggccagccaagtccgcaacaccgcgaaggggtgaaagatgtgatgcgctttaacgagccgatgtacaaggttggagagcagaacagcgtctgtatgtcctgtcatctgccggaacagttgcaaaaagcgttctggccgcacgatgtccacgtaaccaaagtggcgtgcgccagctgccattccctgcatccacagcaagatacgatgcagacgttaagtgacaaaggacggattaagatttgcgtcgattgccacagcgatcagcgcaccaatccgaactttaacccggcgtctgttccgttgcttaaggagcagccatgacctggtctcgtcgccagtttctcaccggcgtcggcgtgctggcagccgtcagcggcaccgcagggcgcgtggtggcgaaaacgttgaatatcaatggggtgcgttacggcatggtgcatgacgagagcttatgcatcggctgtaccgcctgtatggatgcttgtcgggaagtgaacaaggtgccggaaggcgtcagccgcctgacgattattcgtagcgagccgcagggcgaatttcctgatgtgaaatatcgcttcttccgtaagtcttgccagcactgcgatcatgcgccgtgcgttgacgtctgcccgaccggtgcgtcttttcgcgatgctgccagtgggattgtcgatgttaatccggatctctgcgtcggttgtcagtactgcatcgccgcctgtccgtaccgcgtgcgctttatccatccggtcacgaagacggcggacaaatgcgatttctgccgtaagaccaatttgcaggccggtaagttgcccgcgtgcgttgaagcttgcccgaccaaggcgctgacgtttggcaatctggacgatcccaacagtgagattagccaactgctgcgccagaagcccacttaccgctacaagctggcgctgggaaccaaaccgaagctgtaccgcgtaccgtttaaatacggggaggtgagccaatgacgcagacttccgcatttcattttgaaagcctggtgtgggactggccgattgccatctacctgtttttgattggtatttctgctggtctggtgacgctggccgtgctgttacgtcgcttctacccgcaggcgggcggtgcagacagtacgttgctgcgcaccacgctgattgtcgggccgggcgcggtgatcctcggtctgttgatcctcgtcttccacctgacaagaccgtggaccttctggaagctgatgttccactacagttttaccagcgtgatgagcatgggggtgatgctgtttcagctctacatggtggtgctggtgctgtggctggcgaaaatctttgaacatgatttgcttgccctgcaacaacgctggttgccgaagctggggatcgtgcaaaaggttctgagcctgctgacgcccgttcatcgcggactggaaacattgatgctggtgctggcggtgttgttgggggcttataccggctttctgctgagcgcgctgaaaagctatccgttcctcaataacccgatcctgccggtgctgttcctcttctccggcatcagctccggtgcggcggtggcgctgatcgccatggcgatacgccaacgcagtaacccgcattccacggaagcgcagtttgtacaccgtatggaaatccctgtggtatggggtgaaatcttcctgctggtggcgttttttgtcggtctggcgctgggcgatgacggtaaagttcgtgcgctggtggcggcattaggtggcggtttctggacgtggtggttctggcttggtgtcgccgggctggggctgattgtgccaatgctgctcaaaccgtgggtcaatcgcagttccggcattcctgccgtgctggcggcgtgtggggccagtctggtcggcgtgttgatgctgcgctttttcattctctacgccggacagttgacggtggcgtaagccagaaaagaggtggtttctggacgtattccttcctgaagtcggttttctggcgttgttgttaagtctcggggtcaacgtgttgaccccgttgacggccttcgcgggagtgcggttgcgctggcctgccatgatgcgactcacttgcatcggcattctggcgcagttcgcgctcctgctgctcgcctttggcgtactgacgtattgttttctcatcagcgatttcagcgtcatttatgtcgcgcaacatagctatagcctgctgagctgggaactcaagctggcagcggtgtggggcggccatgaaggtagcctgctgctttgggtgctgctgctttccgcctggagcgcgctgtttgcctggcattatcggcagcaaaccgatccgctatttccgctgacgttagccgttttatctctcatgctcgccgcactgctactgtttgtggtgctgtggtccgatcccttcgtgcggatatttccaccagcaatcgaaggccgcgatctcaatccgatgctgcaacatcccggtcttatctttcatccaccgctgctttaccttggctatggcggtttgatggtagcggcgagcgtggcgctggcgagtctactgcgcggcgagtttgatggtgcctgcgcccgaatttgctggcgctgggcgttacctggctggagtgcattaacggcggggatcatcctcggttcctggtgggcctactgcgaactcggctggggcggctggtggttctgggatccggtggaaaacgcctctttattaccctggctttctgccactgcgctgctgcacagtttgtccctgacacgccagcgggggattttttgccactggagcctgttgctggcgatagttactctgatgctgagcctgctgggcaccttaattgtccgttctggcattctggttagcgttcatgcgttcgcgctggataacgtccgcgccgtgccgttgttcagcctgtttgcactgattagccttgcgtctctggctctgtatggctggcgagcgcgggacggtggcccggcggtgcattttagcgggttaagccgggaaatgttaatcctcgctacgctgttgctgttttgcgcagtgctactgatcgtgctggtgggaacgctttatccgatgatttacggcctgctgggctggggacgcctctccgttggcgcgccgtattttaaccgcgcgacgttaccgtttggtctgttgatgctggtggtgattgtgctggcgacgtttgtctctggcaaacgcgtgcagcttccggcgctggtagctcatgcgggcgtgctgttatttgccgctggggtcgtggtctccagcgtcagccgtcaggagatcagcctgaatttacagccgggtcagcaggtgacgctggcaggatacaccttccgttttgagtgcctcgatctacaagccaaaggcaattacaccagcgaaaaagcgatagtggcactgtttgaccatcagcaacgcattggtgaactgacgccggagcggcgtttttatgaagcacgccgtcaacaaatgatggaaccgagtattcgctggaacggcatccatgactggtatgcggtcatgggggagaaaactgggccggatcgttacgcttttcgtttgtatgtacaaagcggtgtgcgctggatctgggggggaggattgttgatgattgcgggcgcattgttaagcggatggcgggggaagaagcgcgatgaataaagggcttctcacgctactgctgttatttacctgttttgcgcacgctcaggtcgtagacacctggcaattcgccaatccgcaacaacagcaacaggcgttaaatattgccagccagttacgttgtccgcagtgccagaatcaaaacttactggaatccaacgcgccggtggctgtcagtatgcgccatcaggtttacagcatggtggcggaggggaagaacgaagtcgaaatcattggctggatgaccgaacgctacggagattttgttcgctataacccaccgttaacgggtcagacgctggtgttatgggcgctgccagtggtgttgttactgctgatggcactgatcctctggcgagtgagggcgaagcgatgaaacagcccaaaataccggtgaaaatgctgacaacactcacgatattgatggtatttctctgtgtcggcagttatctgttaagcccaaaatggcaggcggtacgtgcggagtatcagcgtcagcgcgatccgctacatcagtttgccagccagcaaaccccggaagcgcagcttcaggcattgcaggataaaatccgcgctaatccacaaaacagcgaacagtgggcgttactgggcgagtactatctgtggcaaaacgattacagcaatagcttgctggcgtaccgtcaggcgttgcaactacgtggtgagaacgctgaactgtatgcggcgctggcgacggtgctttattaccaggccagccagcatatgaccgcccagactcgcgcaatgatcgacaaggccctcgcgctggacagtaatgaaatcaccgccctgatgctgctggcttccgatgcgtttatgcaggcgaactacgcgcaagccatcgaactatggcaaaaagtgatggatctcaacagtccgcgagttaaccgaacacagctggttgagagcattaatatggcgaaattgttgcagcggagattggattaatcatctggtgatgaagattatgtcattgagctgcataaaaaataatcgaatgaacatatgccaaaaataatcactaatcagtattattgcagattaaacaaataaaaatctttccataacaaatggttattcattaatcctgccataaactcgcgttattatgcattaatgcagcgaaaagctctgttgttaaagggttgcgcaacataccgcgcaaatgatactgatcataagcgttaaaaaaatctacaaaccaacgcaacacaattcatgccccggcagtatgtcacgttctcgcgtttctgaacggggaacggcgctccattgaggaagtcattcatatgaaaaatataaaattcagcctggcctggcagattctgtttgctatggtgctgggcattctcctgggaagctacctgcactaccatagcgacagccgcgactggctggtcgtcaatttgctctctccggcgggtgatatcttcatccatctgattaaaatgattgttgtgccgattgtgatctccacgctggtggtgggtatcgcgggtgttggtgatgccaaacagctcgggcgtattggcgcgaaaaccattatctacttcgaggtgatcaccaccgtcgccatcattttggggatcactctggcgaacgtcttccagcccggtgccggggtggatatgagccagttggcgaccgtcgatatcagcaaatatcagagcactacggaagcggtacaaagcagttcccacggcattatgggcacgattttgagcctggtgccgacgaacattgtggcgagcatggcgaaaggcgaaatgctgccgatcatctttttcagcgtgctgtttggtctggggctttcttccctgcccgcgacgcatcgtgaaccgctggtgaccgtgttccgctccatctctgaaaccatgtttaaagtgactcacatggtgatgcgttatgcaccggtgggtgtgtttgcgctgattgcggtgacggtggctaactttggtttcagctctctgtggccactggcgaaactggtgctgctggtgcatttcgccattctgttcttcgcgctggtagtgctgggaattgtggcgcgcctgtgcgggttaagcgtctggatcctgattcgtattctgaaagatgagctgattctggcgtactccactgccagctctgaaagcgtgctgccgcgaattattgagaagatggaagcctacggagcaccggtgagcatcaccagtttcgtggtgccgaccggttactcttttaaccttgatggtagcacgctgtatcaaagtattgccgctatcttcatcgcgcagttgtatggcattgacctgtccatctggcaggaaatcattctggtgctgacgctgatggtgaccagcaaagggattgctggcgtgcctggcgtgagctttgtggtgttgctggcaacgctgggtagcgtaggtattccgctggaaggtctggcgtttattgctggtgttgaccgtatcctcgacatggcgcgtactgcgctgaacgtggtgggtaatgcgctggcggtgctggtgattgccaagtgggaacacaaatttgaccgtaagaaagcgctggcttatgagcgtgaagtgctgggcaaatttgataaaactgcggatcaataattgaagattgccggggatatccacccggcaatgtgtgaatgcctgatgcgacgcttgccgcgtcttatcaggcctacgccagacagcgcaatagcctgatttagcgtgattttgtaggtcggataaggcgtttatgccgcatccgacatcaacgcctgatgcgacgcttaacgcgtcttatcaggcctacgccagacagcgcaatagcctgatttagcgtgattttgtaggtcggataaggcgtttacgccgcatccgacatcaacgcctgatgcgacgcttgccgcgtcttatcaggcctacgccagacagcgcaatagcctgatttagcgtgattttgtaggtcggataaggcgtttatgccgcatccgacatcaacgcctgatgcgacgcttaacgcgtcttatcaggcctacgccagacagcgcaatagcctgatttagcgtgattttgtaggtcggataaggcgtttacgccgcatccgacatcaatgcctgatgcgacgcttgccgcgtcttatcaggcctatcttaaccgttggttaatttttcaaactcttcacacccggtatcaaacccttccatacagctcaggttcaaccagtgcagcgccttttgcttgttcttctcgataaaaccttcttcaccgtttaagaacatcattcccgcccagtactcggaataaccggttcgggaaattgcagagctgcgtttgaaataccaggttgccttgtcatcgtcggccttaatgcccacgccgttggcgtaaatcaaaccaagcagcatttgggcatcgacggcagagtcgttctccagatcttcgctggcgttttctaacaggctaattgcctttggataatccggtttacccgcttgagtatttaccagaatatgcgccagcgttacttcaccttctttactgcccgcttgcgccgctttctctgcaagaacttttgcttgtggatagtccagactgaccggattggtgattttgatctgcgccagcagcgcgcaggcatcagcatcaccgctgtcggcggctttctgtgcccaatattcggctttgctcaaatcgccggagctaaaccagctgtcggcaagaaaatattgtgcgcgtcggtccccggcctctgctgcctttaaatactggctgccaggctcggagtcgttggcgtgggcaaagaatgtcaaaaacaacatcaatgcgataatttttttcattttgataatacgattgggtagggagtaaccagtataaagagttcgaatggataaaaaaacagcctccgaaaggaggctgtagaaaggacggtattacgccagtgccgcttcgcgcaggcgagttttcaacttgttgtactcgtcaatcacgtactgctcggcggcgcgctgatcggcgatcggctcgacgcgaacggcgcagtatttgtactccggcgttttcgtaatcgggcttaagttttcggtaaccagctcgttacaggcaccaatccaccactggtaggtcatgtaaatcgcccctttgttcggacgatcgctgacctgcgcacgggtgataattttgcctttacggctgtgcacccaaaccaatgcctcatcttcaatacccagacgtttggcgtcttcggtattgatttgtgcgtagccaggttcatcagccagcgccgccagtgccgcacagttaccggtcatgctacggcaagagtagtgaccaacttcacgcaccgtactcagtaccatcgggtactcgtcggtgagtttgtcgattggcgctacccagtcgcaggtgaagaactgcgccagaccgttcggggtatcaaacttctctttaaacagataagaagtcccctgatcggcatcactagtatcgcggcaaggccactgaatgaagcccagttcgcccattttctcgtaagtcgcaccgtagaaatccgggcacagatgacgcaactcatcccagatctcctgggtgttgttgtagtgcatcggataacccatacgggtggcgatttcactgatgatttgccagtccgttttcagatcccatttcggttcaaccgccttgaagaaacgctggaagccacggtcagccgcagtaaacacgccttcatgctcgccccagctcgtactcggtaaaataacatccgccgcgctcgcggttttggtcataaagatgtcctgaacgataaccagttccagatcttcaaaggctttacgtactgcgctcagctccgcgtcagtttgtagcggatcttcgcccataatgtacgcggcacgcacttcgccatgcgctgcgcggtgcggcagctcgctgatgcgatagccggtatgcgctggcaggctttccacgccccaggctttggcgaatttctcgcggttagccggatctttcacgtactggtatcccggatacgtatccggcagcgcgcccatatcgcaggcaccctgaacgttgttctgaccacgaaccgggttaacacccgcatgcggcttaccgaggttaccggtcagcatcgcgaggctggtcagagaacgcacggtttccacgccctggtagaactgggttacacccatgccccacaggatggcggcgcttttcgcctgggcatacatccgtgccgcctgacgaatctcactggcgctgacgccggtgatatcttcaacgctctccggcgtgtagccttcaacgattttacgatactcttcaaagccttctgtacgactagcgacgaacgctttgtcgtacagattttcttcaataatgacatggcccatcgcattcaacagcgcgatgttgctgccgtttttcagtgcaatgtgcatgtcagcaatgcgcgcggtttcaattttgcgcggatcgcagacgataattttcgccccgttacgtttagcgttaattacgtgattcgccacgattgggtgggaatccgccgggttgtacccgaaaacgaacactaaatcggtattatcaatttcgttaatagcattgctcattgcgccattaccgacgctttggtgcagacctgcaacgcttgggccgtgtcagacacgagcgcagcagtcaacgttattggtaccaataacggcgcgcgcaaatttttgcattacatagttggtttcgttacccgtaccacggctggagccggtcgtctggatggcatccggaccgtacttctctttgatggcgctcaggcgctcggcaacgtaattcagtgcctcatcccaggaaacaggttcgagtttgccgccacgctggcgacggatcatgggggttttcaggcgcggggtcaggatctgggtatcgttaatgaagtcccagccataataacccttcagacacagggtaccctggttggttttcccctgcgctgcctccgcccggacgattttgccgttatcgacgaccaggttgattttgcaaccacttgcgcaataggggcaaaccgtgacgacttttttcatcggtctcgctccagttaatcaaatcacgcatacgcgctctcgactacagtatgcatcttttatgccacattttatgtggggtcattccctgatattacgggcactatttattcaaaactctgacgaaaaacaggctgtcgtcagttttgacgtgacgaaacgaaataccgcgtgacagccatcacgcggcagacattttattttttctcgacgacgggacctgcctgatacccgccgcccaggcttttcatcaactgaatgctttggatcacccggcggctgtccagcatcagtaaactcatctcttcggcaagcactggcaaccgggcttcggtggcctgtaagcggctggttaagccgcgctgataggcggcctcggcagcgcgctgggtaaagcgcgtggcttccacgcgttcagcctgcatttctcgctcgtcgttgagcgtttgcagacgcgtgccgttgacggcaacgtcacgcaccgcgttcagtacactctggttgtaacgttcaatcatcatgttgctggcggcgcgcgtgccttcgagattggcattcaaccgtccaccgtcaaacagcggcaatttcagacccgggatgaagttgaactggcgactggtttttttgaataaggtatgcagatggatggagtccagaccgaaaaacgctttgatatcaaagctcggatagaacaacgcccgcgcggaatccacctgatctaaactcgcctgaacataccagcgcatggcttgcagatccgggcgtctggcgagcaactcataagagagtgtcgccggaatgccggtctggacttgcggtaatgccaccggtctgatctccggcatatcgctggctcccgcgccaatcaatgcacgcagagattctcgcgtttcggtgatttgccctttgacggcaacaatttgtttatcgaccgccagaatctgtgcccgcgcgccgtggaaaggcacttgcgcttccagaccgtgcgccactttactctggtgcgctttcaccgcgtaatcaatcacatcgtgagtttgttctaacagatcgagcatctgatagctggcctgcatactgtaataaagctgcgctacgcccgtggccaggcttagctctactgctgcggtttctgccagcgcggcattatgcgcgccaatggcggcggcaaccgcactgcgatgcacaccccacaaatcaagatccagtccggcaaacaaacctactgtggcttccgtatagtacggcccgtccatacccagtgctggcgcatccatactataagggcttaaaaagccgttcgcgctgacacgttggcggttgagcatccctaacgctgcgacctgtaattgactaccggcatctaacaaatcggcctgggactgcgctttttcttcccgcagtttcgcttcggcgagggtgtgactaccacttagcgtccgttggatcagcgcatccagctgcgggtcattgagttgtttccaccactgcgcctgcggccagccggagctggcaagatgaatatcgtcggccagtttgatttgttccggtttgagctgttgatgaggtgcagaatccttacgtaccagggcacagccggaaatcagcgtcgtgctgccgagaatgctgcacaacagcagacgactaagttgacgattgatcattgcgtggctccttgtgcctgttccgtggcgggcgttaatgccggggctgtccagtctggcaagcgggcgaaaagctggcagacgtgttgctcctgttttaataaggtgggcaggatggcctgagaggcgggtgtctcttcaagcgttatttgaggagaacggctgagtgcggttgccagaccggcagcgtatttctccagggcgtcggcaaactgacctgctctgtccggctgtagtgcgttatccagcgcctgcgcgctgttccaggtggcatcccaggcgtgaagaagatcgcggccctgacgaataaccgtttggctacgttcaatcagtaatgcgcgttcttcgctgtccagttgacgctccagcgccacgcgttggcacatctcttcacaggcattaaacgccgcatgcagaccgatacgaatttgcagataagtgcgcagagccgtgacttcctgctggcgtgggatccgcattactttacttaacatacccagcgtgccagccagtttttgcggcagtgtgcgcgcttcactttcaggccagacaaaggtgtaaatcaccgcggacaccacggtaccaatgatgatacccagggcgcgatcgcgaatttccaccaggtcgtacactgggccaaaaacgttttcgagcgtggcgagcgcgaaggtgaccaccatctgtgtgccgatataagaagagcgttcagagctggtggcaatccatgcgcccaacaggaaaatcggtgccagcacaaacagcaattcgacaatattgtccagccagggcatgaccagtagcgtgaataacagcgccagaatcgcgccgcaaaaggccccgccaaaacgcagcaccatcttctggtagctgctaccgacatttgggttagcgacgatcacgcatgtcagcatacaggtgtgaatgccttcccagtccacgccgctgtaaaaggtgtaacagatcaaacaggcgagcagcgtttttaccgcgtagcgcatatagtctggattggtaaaagcatcggcggccatacttggcggtttggctgcgggcgttggcggcgtattcgggtccatctgacccagttgtaacaacgtctggcagatattctccaggttacattcccgtgccgccatcgcttcactttcactgatccgccagtcgctttgccagcactgaccttcagcaacggcatgctgcagcttgttgatttcactagctaatttttgtcggaattcaataattgcctgagaatcagcaaaagaggtgggatcgtagcgattcagcgtgctgtaaatgtaggttaccgttgccacgcagctttgccaccatgcgttttgagttcgccagttggcatcgtccgcgaggcaaaagacattgagtttttgtagcgccagcgcctctctttcaatccgcgtttcgggtagcggtgcgaggctgtctgtcaggtgactaatggcatcatcaagccgatcattaagcgcctgatgcatttggctaatggcacgactgggaaaccacagcacgccgattaacgtcatcagcaaggttggatagaggccaacaacgatacaccacagcgttaagcgcacgaccacttccggatagtcgagcatggcggggaaggtttgcccgtaaatagcgacaatggcgacggcgaaaaagaccagccccaagcgatgggtgcgcatcaaaaacatgcagcccatcaggatcggtccggcgatgatcaatcggatcaacggttcgccgtaactccatttgtagatcaaaaacaggctgccgatctccagcaccgtggcaaccacaaacaagatcgcgacaaatttggtgtaaaacgcgttgctctgaataccgtaaaacagcactgccaggcttaacgccacaaaagggatctcaaaggtcatgctgatcagaatcaccagcaggcagcctacccagagttgcacggtctgcggcacgcgacctggtcgccgctcgcttaactcttcatgaaagaacgccagcagcctgaccaccggtaatggcagggagttgagcgcgctcattattgcggctcaagattagcgactgcgctagcgccgatgcggaacatttccgggtcaggtttatcgaccatgattttgaccggaaaacgctgggcaacgcggacccagttaatagaacgagacactttcggcaggccgcccagcaccaggccgccgtcatccggtagcacgccgtagccaatgctatccactttaccctcgaaggttttgccgctgtcactcatcaggcgaatcgttgcgggtgtaccactgcgaatatttttcagatcggtttcgcggaagttggcgatcacataccagtgacgagtgtcgattagggtaaaaatagggcgcatggcagaagcaaattgcccgacggaggttttgagggaaatgacccggccatcaaacggcgcgcgaacggtcgccatttccagatgcagtttggtcagggcaatatccgcttcgaccgccgcacgctgggcaactaatgcatccacgccgctgacggcgctggcggcactctgcgcctgtaacaatacggcattaagatccgcttctgcggcgcgctgcgccgttcttgcacggtcaacatcttccgcactgacaaaaccttctttcagtaatggctcggtgcggcgtaatgtatctgtggcctgtttcgcggcggcacgggctttttctaccgtggcattaacgctgtcggcaccaaactgttgcgcgtcaacgctacgctgggtgagcataatttgcttatccagcgccgcgagggaggcttcagctttcgccagattggcttcgtacgggcgcgggtcgatgcggaacagcaaatcgccctgtttgactgcctggttgtcggtgaccgccagttctacaatgcggccgctgacttccggtaccacatcaatggtatctgcactcgcgtaagcgtcattagtacttggcgcactgtctacgcgccagataacgaaaacaagggcaaccagcgccaacgcaaccactaacagagcagggaatttactgcgaggagcttttttcggcgtactttccatgagcgcgtctcaaatagattagaaaaatgccagccagaacagcatggcgtagagagcaaaaagggcggtataaataattccgacaaatgccagattgatatttgcccgctgaataactcgcctcgtgatgagcgtcaaaataaggctggcaatggcgcagaaaaaccagctgggataataagcgccgatcaccgggattgccggagataatgagcatcccgaaaccatgaagacgggaattatccaggctgtttttttgagttgcatcgccatgcgagagagaactgttggcatattaaatacatcctgtctgctgcgaacaatatctgtagtgaatatcaatatccattgaaggcgtcagtatggctattttcttgatgaataaaaatagctttattcagccaccgcattcataacttatatattttatttattaattggctgtatatatttttaaaataaatacttttgggggcttcagcgcccccaaaagcgagtgacattaatttggggttacgatattcacccacaaatcgaaattatccagacaggcgataatttcttccagtttcgcgccattgccaataattttggctttcttcgcttttaccagatccgccattttggcttgtccggtcagcacggcgtgcagatcttcacggctgatgtagaaagaggcgtcggcttgcggttgcagcgttttccggtagttaagcacgctatcgttcagcgtcaggttgaggttatcgccgttgctcatattgaagttcaggctgatatttttacccgcagctttcgcgctatcgaggcgaacggccataaagtcgaacagcatttcgacgctcatcccgcgaatggtgtccggggaaccggtggtgccgtggctgaacttatgcaccccttcgcgcagctctttcgcgccggtcaggtagaaaccgcgccatgtggcggactcggcctgatagcccagctgttcaaagttattcgcttgcagattcttcgcgacctggtcacccgggttggcggcaatcacctgtttcagcagttctgcgctccagcggtaatcaccttgcttgttcgcttcttgcgccaggttgatgacacgggcagaaccgcccagcgcctgcacgtaacgtttacccatctccacctgaccatacggatgcaggttagccgggttaccgtcgtaatagccaagatagaagttatacaccgcgcgggcgttgtggctgacagaaccgtaatagccgcggctggcccagttattggcaagtgcaggcggcagcttaatcatgtcgccgatttcattcatggtgtagccctggttcgccaggtgcagggtctggtcgtgaatgtacttgatggtatcgcggtatttaccaatataatcattgatatgcttattgccccagaccggccaggtgtgcggcataaacagcacttccgcgtcgttaccccacatatccagcgtttcgttcagatactcggtccacttgctggtgtcgcgggttttcgcgccgcgcagagtgtagaagttgtgcagggtatgcgtggcgttctcggcggtacacagggctttcagggccggaatatagaagtgcatttcggctggcgcttcgctacctggggtcatcaggaagtcaaactccaggccgtcgataatcatcttctcgccagttctgacgatagttttcgtcggtgcaataatgctcgggtcgcccgttgccagcgtcacgccaaggccattacccacattgccttgcgcgttgtgcggcagtaacagaccgtaagagtagagcgcacggcggctcatgatgttacccgccagcacgttttcgctgatggcttcgtccataaagcctgcaggggcaatcacctgaactttgccggatttaacatcggcttcagagataatgcctttcacgccaccatagtggtcggtgtggctgtgagtgtagataacggcaacaatcggtttttgcggacgatgctggaagtaaaggtcaagtgcggcttttgcggcaggcggcgtcaccagcgggtcgataacaataatgcctttctcgccctcaacgaacgtaatgttagagatatcctggccgcgcacctgatacattttatcggtgactttgaacaggccagaaataccgttgatttggctctgacgccacaggctggggtttacggtttccggcgctgcggcattaatatcaaatttgtaatcgtccgcgcggtagtaaactttaccgttcgcatcacgcagaataccttcatccagcagcggggcgataaatccacgctgggcatcgtcaaaatcctgacgatcgctaaacggtaaacttttggcgtaattctgattaacctgttgggtatattgagtggcggctttcgcttcctctttcgcgttagcggtatttaccatcatgccgctggcggcagttaacgcaataacaatcctgctcaaacggaataaccgagagttattcatataaatctccatttatcatttatgtcgtaaatatgtaatccatgcaaaatacgtcatttaaagctggcgttatcataattgggaaattgcgactttaataagtggaagtgtgagcggaacgcgccattttattaggcatttgtgctgaagagggaaaattacagtaaaactatcattgcagaaaataatatgagtcgttttatgtgtttattatatatattgtacctgtcgttggcacagcgggacattgcgctactgtgccaacgttttactcatggggctttagcacagaactgtggcaaaaaacgttgatgcgccaatattgctgcaccctgagcgccattaaagtcagaagaactggcggcaataaagcgcacgacctgatgcggcagtggacggcgcaggtacttttgggtcatggcaacgagagtctcgcgtgggaaggcgggcatatccatcacgccaccgcccaggatcaccgcatcgggatcgaacagattaatgctggtggcaatggcccgtgccgcgttttcaagcagactctggacgaaaggggcgttttccgcatggacgaaaagatcgcgcaatgggtaatttcggggctgttgttcgtaccagcgtcttagcgccattccagagcaattggtttccaggcacccaggattgccacacgcgcagtgttgggtcatatctcccagggggatatgacccagttcgcctgccacaccgtgtgcacccgtccacggcgcaccgttcatccacactgcgaaccccatccccgtaccgagataggccgccagaaccagttgttgcgtaaggcggttttctactacgtcccaggagagttgcaggttaacgtcgcgggaaaactcaaccggacaattcagcgtattttcgagcttatcggcgagatcatataaatccgccgctgttaacggcaggttaggcgtagaaataatggtgcgtttatctttactgaccagcgccggaaatcccatcaccagaccatgacagcgagcgttaaagcgcctgagttgctcgtcaatcatttcgccgataccgctcaccaggccgggagcaatgacttctgcggtccgctttttttcgcagtgtagcgtttcaccttctgctgtccgcagacaaaagcggatatgcgttgcccccatatccacgcccgctacgacgttatgctgtttttgcatgaggctgtacctcgctttttgcagccagaatctgcgcggtcataattctccatgcttcgtcgatattttccgcatgattaaacaggccggaagtgccgacgataaagacatccgcccctgccgccatcagtttttcgtaagttgcctggttgcaggaaccgtccacctcaatttcgtactccagaccttctcgttcacgccatgccttcagttcggcaagtttatccagcatttcaggaatgaacggttgtccggcaaagccgggatcgacagtcatgaccgtaattttatcggccttatggatatagtatttcatggcctcaactggcgtctccgggttaaggatcagccccactttcatgtcatgacggcggatttcatcaatcaggcggaacgcctggccgttgatggtttccggatgcagagtgatgaaatctgctcccgcacgcgccagttgagcaatgtaatcctgcggccgcgtcaccatcagatgacagtcgagcggtttagttgccagttttttaacctgacttacgaagaacggactgagtgtcagattggggacaaagtgaccgtccatgatatcgatgtggaagtaatcggcatggctgtcgataaattcgatctgttctttaaatttcagcagatccatacacattaagctgggggagattttcatgttcaattccttacttactgataagacggtcaagggcgacagccgcgataattaatccgcccatcaccaccagttggtaataggtttgtacctgcaaaatattcagaccgttgttgatggtgccgatgatcaacccgccaatcaccacagagaaaatgcgccccttgccgccgaagaaactggtgccgccaatgatggcgctggcaatggcataggtttcaaaacccataccggcaagcggttctgcggcaccgagtcgtgcagtactgacgacgcctgccagacctgcacaaacaccggagatgataaacaccaccaggatgtggaatttcacgtcaatcccggaatagaacgcgctatttttgttgccgcccagtgcgtagatgttgcgcccgagccgcatacgcgttgtcagaaaccaaaggatgagcgcgacaattagactgaagataacggggacaggtatcccaattacgctggcggcaaagaagttcacgaagtcaaaactgaagccgtatacgctgttggcatcggagatcaccagcgtgatcccacggaaaatcgcgttggtgccaagggtgatgatgaacgggtgtagccccgtccagttgaccaggcagccgttgatcgcccccagtgcgccgccaaccagtacaccgccaatcatcgctgcgagaaacgggtcaacacctgccaacatcagtttggcggtcaccataccggaaagcgccagaatcgcgccaacgctgaggtcgataccagcgaccaggatagcgaaaaactcgcccatgccgatcaataccgtcacggagctttgaacaaaaatctgggtaatattattggtggtcagaaaatattctggactcaggctaccaaagatggcgacgatgatcgccaggataaaaaaggtgccgtatttatcccagaacagcgcaaagttgaacggtttcttctcgctcgcttcgctttttactcttgtggtaaagcccatgccataatctcctcttcgctcatgtcatcgcgattcgtcaggatttgcgtcagtcgtccttcgcagaacacggcgatgcggtcgcagacggtgataatttcaggtagttcagaactcaccatcaggatgacttttccgtcgtccgccagttggcgcatcactttgtaaatttcggctttcgcgccaacgtcgatgccgcgggtaggttcatcgaaaataatcacttccgggcaacagcacagccatttggagatcaggactttctgctgatttcccccggagagttcggtgatattctggtttacgctatgacatttcagcgccagcagttcgcgttgattttcagcggtacgttgctcgtcaacttcatgaaacaagcccatcgcgcctttatagccgccgtctttcagactgcggctgatcgccatgttctgagcgatggaaaagttggggaaaaaaccgttatcccggcggctttcagtgatgtaagccatcccttttttcacggcatccaggggactacgtggagagatatctttgccattaagacggatttctccgccagcgcgtttatccacgccaaacagacaattcatcagttcagtacgtccggaaccgaccagtccggcaaagcctaatatttctccccggcagacgctaaaactgatatcccggaccttttttctgtcacgactggtgacgttccgcacctcaaaaaccgtttcgtgcgcaaggttgctgacattctccttcatcgcgttaaaacggttttgcagttcgcggcctaccatcagacggacgatatcgtcattactcacatcgcttactatgccgctgcaaacgctgctgccgtctttcatcaccgtatagcggtcgcaaatacggcgaatttccgccaacttatggctgatatagacgatggccgtaccctctttacgcaactgattcatgatcagaaacagatagtccacctctttattggtgagactggaggtgggttcatccatgatgatgactttggcatcgagcatcagcgttttggcaatttctagcatctgcttgtggctgatagataaattcgccactttctcatctagatcaactttcaagcccacgcgtaataacatcatggcggcgcggacacgcatttctcgccagtcgataatattgacgccacagatttttttcgtcagatgacgaccaatatataaattttccagtacggttaattcatcaataacgctgagttcctgataaataatcccgataccgagttgtgccgctaatttatgatccagcttgttatagctaatgttattaatggtaatggtgcctttggtcggctcatgtattccggataaaactttcattagcgtggatttacccgcgccattttctcctagtaatgcatgtatttcaccaggataaaccgttaaattaacgctctttaatgcgtgaaccggaccaaaggacttgccgatccccgccatgcttatatatggcgtggccataaataacctctctgcacgaaatatcgtattattgcctgatggctacatttatcaggtctacgttcaggttattttgttggccggataagacacttcattagcatcatcatccggcatcattcagttttattgagtgaccaggatactatcgaccagtttaaattccggtgctttatccagcgggataaccttgccggatttctcagcgtcaaccatcagcttcagacccgttgcgccgatatccgccgggttctgggcaaccgtcgcggtcatttgtccggcttccaccattttgcgggcttccggaatgccatctgtaccgacgaccagcacttttcccgtttttccggcgtttgcgactgcctgagcaacacccattgccatcgtgtcattcgcgcaatagatcgctttaatattcggattacgttgcaacacgttagtggcgacatccagtgctttaatgcggtcccagtcggcaggctggctggcgacaagcttgatctggcttgcttttttgaaggcttcggtggcaccattacgacgcgcttcaccggaggcgttaccggctttaccctcaatgattgcgacttcaccaccttcagcgcccaatttgtcaataatgaagctcgcgcctttcgccccgacagcaacgttatcggtggtgacaaaagcttccacattgccgccagcttttttcagattatccatgtcgattttttcatcgagattaaccagataaatgccttttttccatgcgcgggcgacaggcatgaccagattcacactggataatggagcgaaggcgatacctttgtaatttttattactgagatcttcaaataactgcaattgagattgaaaatcgccttcactaggagaggcaaaaatatcaacgctgacgcccagtgtttttgcttcatcttcaatgccttttttcatatctacccaaaatgggttggagagggttttcaatacgacagcatattcggcggcagcaaaagcgctggtactcaacattaagcccacgagtgtgccgctgaaatatttcagatatttattcataataatgttctcacggtaaggggacaggtaactccgcgatggcggaattacctttttcttatttcagcgcgcctggactgaagaaatcaacaattgcgccggttttttgcatattaatattagcttgttcaatgttgagctgggcgacagagacaaaaaaagcgtccagcaaagttagttgtaatattcttgcgctggcattacgacctaataacggcgtttccggggctggactgcaaataatataatcggccagtttcgctatcggactatggtagctatgggttatacaaataatctttgccccgttcttttttgccagttctacggccgcttttacatcactggttcgcccggaatgggtcactaccagcacaacatctccttcctgtaacaagctagcggacatcatcatgatgtgagcatcaggataggcctgacagcgtacgccaatgcgcaagaacttgtgctgtacatcagcacagatagcattacttcctccggcaccgtacaaatcccgctgtctggcctgatagaaaaagcgggcggcacggtggatctcatcaacgttgacgatgctctgaccttccataatggtgcgtaaagtgatgttaaataccttattcaccacatcctgcggcgcttcatcaaaagccaactcggaaggcaatacctgttcactctgagaaaaataatcttccagcgcactgcgtaagttacgaaagccgctaaaccccagcagcttacttaccttaactatcatcgcttcagataccgccagagcttctgcgacatctttaattgcgggtgcacaactcaggttaccgggtttgagtaaccactccacgatgcggctttcattttctgtcattccttcctgcttcattcgcaggtaaggcgctaaccctataccgttcggaagcgcactatcaaactcactctggctcatcacgttctcttgtccttgaattgaagacgccactatatcaccacagcaagaacagaaaagatgctggcgacttcacaaaaaaataaaatttataaagtttattttattgtgaacaatggcgagtggcttaaaattttatttcatttaattagtttaaaaacatgatgttatttgtttttctggttttttagatgatagatgttgctggatggtgagtgtctttaacgctattgcgctgtcagatgtaactctgtaaaacagatcaggaaggcgtaattcatcgattttgggtgtttttaattcattaacatcacaaatgttttttgattgtgaagttttgcacggacggggaagatgaatgaaaaagattgcatttggctgtgatcatgtcggtttcattttaaaacatgaaatagtggcacatttagttgagcgtggcgttgaagtgattgataaaggaacctggagcagtgagcgtactgattatccacattacgccagtcaagtcgcactggctgttgctggcggagaggttgatggcgggattttgatttgtggtactggcgtcggtattagcatagcggcgaacaagtttgccggaattcgcgcggtcgtctgtagcgaaccttattccgcgcaacttagccggcagcataacgacaccaacgtgctggcttttggtagtcgagtggttggcctcgaactggcaaaaatgattgtggatgcgtggctgggcgcacagtacgaaggcggtcgtcatcaacaacgcgtggaggcgattacggcaatagagcagcggagaaattgagattcatccactacttgcatggatgagtaatgattaatgtggatagagtttctttttgaggttggctaatgaaacgctttccgctatttcttttattcaccctgctcacgctgtccaccgttccggcccaggccgatattatcgacgacaccattggcaatattcagcaggcgattaatgacgcttataaccctgaccgtgggcgagactatgaagatagccgcgacgacggctggcagcgtgaagtgagcgacgatcggcgcagacaatatgacgaccgccgccgccagtttgaagatcgccgcaggcagctggacgatcgccagcgccagcttgatcaggagcgtcggcaactggaggatgaagagcggagaatggaagatgagtatgggcgatgaggttgggtatggagcaggcatcgcccctcaccccaatggggagagggagaaaacgagcgcaatattcaatatcgagcacaatcggtcccctcgcccctctggggagagggttagggtgagggggccagcgcgcacattccctctcatcacgccaccccaatctccatcccatcaaaccccacctcaaacccactcggtagtgcgttttccatcagccacgcatcaaactggtggctgatatgggtcagaatcacccgtgggctgcggataacctgattcagcgcaagcacggtatttaaatcacagtgattacgcggtgcatccgcgcgcggcgggtgactgcaatccatcaccattacctgcggctgattattgcgtaaaaatttcagcgttttttccggcaagcctgcggtgtcagacagccacgccacccggctgtgtgccgtttccagcagataaccgaaggtcagtttactgtggttgagcggcaggggcgtgacctgtaacccctgcaaatcaaacaccacaaacggttccaccgtgtggctgaaatcaagcaggcccggatgtttaaacagatcgtcgcagccctgttcatccggcgggccgtaaaccgggatcggatcgccaacgccccagcgcagcggaaacagcccctggacgtgatccatatgataatgcgtcagcaaaaactgctggaagcttccggggctccagcgatcggcgagatcgtgcagcccggcgtcgatcagggtgattgcgtcgttaaacttcactacgccgctgcacggttggcggcgatactgcgggctgcgccgcgctctggcgcaggccgcacactcgcagccccatgccggaacgccctgtgcgccgccggtgccggtgagcgtgagggtcaggctcatgttacagcgccttggtgaagcggaagtggctctgctcgtagccttcgcgcagatagaaacggtgcgcgtcgtggcgcttcacgttggtgctaagttcggtcatttcggccccggcctggcgggcttcttcttctgcccacgccagtaacttactgccgacgttcagaccgcgcgcctgcggcattaccaccaactcctgaatttcgccgatccagttgacatgatgcagatgaaactgcaaatgcaggccgatcatgccgacaacttcgccatcaagcagcgccagatggtagcgcatgtttgggtcgcgcagattggcgttaaaacccacgcgaaacgcgtggtggtcaaactccgcctgttttagctcacaaatcagcgcgtaaaccgcgtcggtgtcgtactgcgtggccgggcgaagctcacaagcaggcatggtgtttctccttctgatggatcagcgtcagcagcgtgtcgacgctctggcgcaggctgccgtcattgttgagcgtatggcaatcctgtggagtatagcgggcggcgcgcgccaggcgggcgttaatttcactggcgttttcacggccacggttttccaggcgctggcggaggatctccgggctaacctgtaaacagacgggcagcagcgcgctttgatagcgcgcccgcgcctgcggcagatgggcgcgactgccgttgaccagcacgtcgaatccggcgtgcagccagagatcaatctcgacgccgacgccataatacagaccgttagcgtgccagcttaaggccaacagattttgccccgcgcgggtaaaaaactcctgctcgctcagggcgatatggttttcacttccggcgctggcatcgcgcgtgatgtagcgatgcgccaccagtaactgagtttgttcccgcaggcggagttccgccagcaggctgtctttcccggagccggacggccccattaaccaaatcagttttcccatcatcagaacacccttttaccctgacgccagacgtggtcgatatgaatatgattgtccttgcgatgcgccagcaccaggtcggcgcgtttgccctcgccaatcaccccgcgatcctggagattaagcgcctgcgctggatttttagtcaccagcttcaccgcctgcggcagcgtaaagcggttgctctggtcatcggcgacgcgaaatgccgcatcgagcaggctggcggggtagtagtcggaagagaggatatccagcaggccaagctgcgccagttcactggccgccacgttgccggagtggctgccgccgcgcacaatattcggcgcgcccatcagcacgttcatgccatgcttgcggctggcttccgccgcttcgaacgtggtgggaaattcggcgatcacgctgccaagctggtgagattcagcaacgtgggcgtgggtggcgtcatcgtggctggcaagcgcaatttttcgcgcgcggcacagggcggcgatggattcgcgattcggctggctccagcgtgcggcgagcgccagttgctcttcttcgtactgctgcatctgcgcatcagtgagggagtatttgccctgataatattcgcgatacttctcgcggttggcgaactggcgctggcccgggctgtggtccatcaggctcaccagcgtcaccggctcgcgctgcaccagtttttcaaacagcggcagcgtggtgtgatgcggcagttcgcagcgcagatgcagacggtgctcggcgcggttgacgccgcgtttctgcgtctcttcgatggcgttgatcatcttctccagattctccagccgatcgccgccgtcgcgcacgtcgccaattgccacggcatccagtacggtggtgatgccgctcgccaccatcagcgcgtcgtggctgctcatcgcgctgtgggcaggccagtcaactttcgggcgcggggtgaagaatttatccagattatcggtatgcagctcaatcagccccggcagcagccagccgccttcgccgtccatcgcctccggcaggcggctctggctttcggcaaaggcgcggatttcgccgttctgcacctccaggctaccgcttaccacctcgttttccagcaccagcttaacgttattgataatcatgaagaggctcccattgggtgttagctcaactagaggctcccattgggtgcaggcggtcggcgacgtcattacgtacagcttcgtcatggaagatgcctacgatggctgcgccacgggttttggcttcgcgaatcagttccaccaccgcggcgctgtttttggcgtccaggctggcggtaggttcgtcaagcagcagaatggggtagtcgacgataaagccgcgggcgatgttgacgcgctgctgttcgccaccggaaaatgtgcttggtgccaggtgccacaggcgttccggcacgttcaggcgggtgagaagacgcgcggctttagcggcgcaggcttcacgcggaacgccggtatcgagcagcggctgcatcaccacttccagtgcactgatacgcgggatgacgcgcagaaactggctcacccagccgacggtggttttgcggatttccaccactttgcgcgctggcgcggtgaccaggtctacccactcgtcaccgtgtttgatctggatttgaccttcgtcgggcagatagttggcgtacaggctgcgtagcagagtacttttgccgctgccggaatggccgtggagcaccacgcattcgcccgcgttgacggtgaggctggcgcgattgaggacgggcaggcgcacgccgttttgctggtgcaggatgaaggttttactgacgttttgtacgttaatcatttttcgcctcgtggttcgggtgtcggatgcgacgctgacgcgtcttatccgacctacggggagcgcatttgtaggccggataaggcgtttacgccgcatccggcaccggctcaattctgcaaaacgctactcaccagcagctgtgtatacggatgatgcgggtcgtcgagcacgcggtcggttaacccactctccaccacttgcccctgcttcatcaccagcaaacggtccgccagcaggcgggcgacgcctaaatcatgggtgacaatcaccaccgcgaggttcagctccaccaccaggccgcgcagcaggtcgagcaggcgggcctgcacgctcacatccagcccgccggtcggttcatccataaacaccagcttcggatgcgtcaccaggttgcgggcaatctgcaaacgctgctgcataccgccggaaaaggtggtcggcaggtcgtcgatccggttggcgggaatctccacctcttccagccacttctgcgcggtggcacgaatatcgccgtaatgacgtgccccggtcgccatcagccgctcgccgatattgccgcctgcgctcacctggcggcgcaggccgtcgagtggatgctgatgcaccacgccccattcggtacgcagcaggcgacggcggtcggcctcgctcattgcatacaggctacggttctcgtagtgaatttccccctgctgcggcgtcaggcgcgcggagatgctcttcagcagcgtggtcttcccggagccggattccccgacaatgcccagcacttcccccggccataaatcaaaagagacatcgctaaagcctttgcccggcgcgtaaaggtgggtcaggttattgacgctaagtaacggttgattcattggttttttgcctcgctctgttggcggcaataatcggtatcggagcagacaaacatgcggtttccggcgtcatccagcaccacttcatcaagatagctgtgggtgcttccgcagatggcgcatggctcatcccactgctgaacggtgaacgggtgatcgtcgaaatcgagactttccacgcgggtaaacggcggcaccgcatagatgcgcttctcgcgccccgcgccgaacagttgcagggcgggcatcatgtccatttttgggttatcgaatttcgggatcgggctcgggtccatcacgtagcgcccatttaccttcaccggataggcgtaggtggtggcgatatgaccgaagcgggcgatatcttcatacagtttcacctgcatcacgccgtactcttccagcgcgtgcatggtgcgggtttccgtttcgcgcggctcgataaagcgcagcggctcggggattggcacctggaagataattatctgatcttcggtcagcggcgtttcggggatgcggtgacgcgtctggataaccgtcgcatcgtccgtacgttccgtggtgtttaccccggtcacgcgcttgaagaagttgcgaatgctcacggcgttggtggtgtcatccgcgccctggtcaatcaccttcagcacgtcgctttcgccaatcacgctggcggtaagctgaatgccgccggttccccagccgtacggcatcggcatctcgcgcccgccaaacggcacctgataaccggggatcgccaccgcttttaagatggcgcggcggatcatgcgtttggtctgctcgtcgaggtaggcaaagttgtagccgctcagattagccatggttctgctcctgttgcagacgtttgagtagctccagttcggcctggaaatcgacgtagtgggggagtttgaggtgactgacaaagcctgcggcttcgacgttgtcggcatgtgccagcacgaactcttcatcctgcgccgggcctgtcgcgtgctcgccgtactccggggcttgcagagcgcggtcgaccagcgccatcgccatcgctttgcgctcgctcatgccgaacaccagcccgtagccgcgcgtgaagtgcggcggctcacccggcgggtcgataaaaccgttaaccatttcacactcagtcatcagcagttcgccgacgttcaccgcaaatcccagctcttccggcacaatgctcacgtcgatatagccgctgcggatctcgcctgcgaacgggtgattgcgcccgtaaccgcgttgggtggagtaggccagcgccagcaaatagccttcgtcgccgcgcatcaactgctgcaaacgggaggagcgactgcaggggtaaaccggcggcgtgcgggtgatgtcatccggctgtgcgccgctatcctcttcaaacttcgccagcccctgacgcgccagcaggctgaaaacgtgcgggctcggctgctgttcgctgtcggcggtggtcagcgtcggcgcttcgccgtttgccagcagggtaaaatcgagcaggcgatgggtgtagtcgtaggttgggccaagcagctggccgccgggaatgtctttataaacggcggagatacggcgttcgagacgcatcccggtggtgtcgagcggctcgcttaccgccagcttcgccaacgtggtgcggtaggcgcgcagcaggaaaatcgcttcaacgttatcgccgctggcctgtttcagcgccagcgccgccagttcgcggtcggcaatgccgccttcggtcatcacgcgatctaccgcgaggttaagctgctgttcaatctgggcgacgctcagttcgggcaaatcggtatcgcctcggcgtcggctctcttgcagggcgtgggcggcgtcgatcgccttctcgccccctttcacggcaacgtacatcagcacacctccacatgagtggttcgcggaatagccagcaggcgctcgccacaggtcaggatcaggtcgatgccgagcgggaacggatgcgggcgctcggtgagttcgtgcagaatgcactccggcagctgcggagcgatcattcgttcttcggcaatacccgcaccagtaaggcgcaacatgcgtccgccgctcaggctggcgacctgtaaaatcagcgtcgcacccgcttccggcgcaacggcggtgccggtggaaagggcgttgagctgttcgctggaaatcgcctcatccgtcaccgcgaaggtcgcctgttccggctggctgaccagcggcgcgttggtatgaaaacgcaggctctggttgacgatatcgttatttaatggggtagaaagccacaccggcgtgtcgttatcggccagcgtcagcagcacgctggtggtggcgatattcagcggttgccagccgcgtttgagctgatgcagggcgacaatcacgcccggctcgctcatggcctttaacaggcgacgaaaactgtgctgggcatcctgcacgggaagcataaaagcggtttccagggtcatgcgttgtctccgcgaaccatcgtaaagaagtcgacccggctggcgttcacttcggcctggcgtgcggcaatgcgtgccatacggtcagcgtccagcggggcaataagggtttcacttaagttttgaaagtggcgagattgctgcatcagcgcgtcaatcagcgcgcagcgttcggcgtgctgtttatcacgcccctgcacccagctgtagccgagcgtgccgtcagtcaggcgcacggcggcgcgggtcagcgtggcgtcgccggcaaaaaaacgttcgccggtgccgcccatccgcgcctgaatctgtaccaggccagtttcagcggcgcggatcacctcatagtcggcggtgatgtttagcgcgttcaggcgtgctgccagttcagccggttggctgtgcgccagcacggacatccagtgctggcgggtcgcggtatctgcgtgcattcagtgctccatagtgaattcaatcatgtcggcgcgcgtcaggctgacggagtactccgccgggctgctttcaccgtcacggtggttaagggtgcgcacgcacagcagcgggctcatattcgggatttcaagacgctggcactctttggcctgggcgcggcgggcgctgatccgcgtctggctgcggcgcagcgcaattccggtttgctcgcgcagaaaatcgtgcaggctgccgctgtcgaagcgttgcagcgtcggccagagggtgaggtccgcgaagtagtggtcgattaaacagagcgcgacgccgttgacacgacgcagggtgcgcaggtggatgacgttctccccctcggtaatccccagtgcgtcagcgacgtggccggacgcggggcgcaatacgctaagcagtttttcgctggtgggatggctgccctgatccagcagattctggctaaaacgcgcctgggcgttgagcgggtaatcgaacgggcgcatcagcaccagcacgccgacgccctgacggcgctgtacccagcctttttccaccagttggtcgatggcgcggcgcagggtgtggcgattcacctcaaagcgcgctgccagttgctgctcggcgggaagatagtcgccgcagcggtagtgttgacgaagctcctgctcaagttttgcggctatctcttgatagcgtgttgggtagctggtcggatgtgtagacaagtgcatagatatcaatgcctcgcttatcagataaagtgcttacgcaaccgttgagagaggaaatccagcaggctgaccgtgacgatgataagcaccatcagggcgcaggtttgttggaactggaaaccgcgaatcgcttcccacagggtgacgccgatcccgcctgcgccgaccatgccgacgacggtcgccgagcggacgttggattcgaagcgatagagggagtaggagatcagcagtggcatcacctgtggcagcacgccgtagaggatctcttcgagcttgttggcaccggtggcgcgaatgccttccaccgggccgggctcaatcgcttccaccgcttcggaaagcagcttggagagcacgccggtggtgtggataaacagcgccagcacgccagcacgccagcgaacgggccgaggccgacggcgaccacgaacagcatggcgaagaccatttcgttaatggcgcggcaggcgtccatcaggcggcgaacgggctggtaaacccaccacggcaccaggttttcggcgctcatcaggccaaaggggatggagagaaccaccgccagcgcggtgccccagacggcgatttgcagcgtgacggccatttcggtgaggtaatcctgccactggctgaaatcgggcgggaagaagtcggcggcgaacgtcgccatgttgccgccgtctttgatcagcgtaagcggggccatttccgcgccctgccacgagacgaccaacacggcgagtacaacggcccagctcagaagcgagaaccagctgcgcttgggtggggcgatggtgatggtttgcatgtttggctccggtctgtaggccggataaggtgcttgcaccgcatccggcatcaacgcctgcacattgtcggatgcgacgccggggcgtcttatccgacctacgatttactgcaccgctttactcacgctactcatcgcgcttagcgcgttgttcaggcggtccaggtcatccagctgcgcctgaatctcggtggtttttgccagcttgtcctgctcattcagtcctttattgcttttcacgccctgcatctctttaaacagcgcgagctggcgaatcggcaccagttgcaggtcgctggaagcgcggaatggcgcccagcccaggcgttccagcaccgctttttcttccggcgttttgccgtagttcataaagaagtcgtagatcttgtctttggtggtttcggaaagattcttgcgccagacgatcggatcgcctgggatcagcgggctcttccagatcaccttcagttctttcagcttctctggcgcggaggttttcagcttgtcgaggttttcggtgttgttggtggcaacatccacctgcttgttggcgacggccagcgcgttggtttcatgcccggcgttgacggtgcgcttgaagtcgctggcggagatattgtttttggcgaagacgtagtagccggggacgaggaagccagaggtggagttaggatcgccattgccaaaggtgagatctttccgcttcgccagcagatcgttcaggttgttgatcggactgtctttgttgacgatcaacacgctccagtaacccgggcttccatccgccgcgaccgtctgggcgaagacctggccattggcgcgatccaccgcttccatcgcgctcagattgccgtaccaggcgatatccactttattgaagcgcatcccctggataatgcccgcgtagtccggggcaaagaaggcgttgaccttcacgcccagcttcttctccatatcctgcaagaacggcgtccattgcggtttcaggttttgctgactttccgtactaataatgccgaaattcaacgccttttcctgctcttcggcgtgcgccgggcttaacagggtgctgaggctgaacatgctggtgaaggccaggctggcaattatcttagcgttcattcgttttcctcaatgatggggatgtcaggcagctttcgcgttctcttcgacgcggttaatgctgcggtagagatggtcaaaacgttcgttatcaaactgttggctgctgccgtcgtagaagacgtgcccctggcgcagggcgacgatgcgttcgcagtagcgcagggcgtaatccacctgatgcagcgtgacgaccacggtgatgccgtcgttctggttgatgtcgcgcagggtgtccatcacgatgcgcgcactttctgggtccaggctggcgatgggttcatcggccagaatcactttcgcctgctgcatcagcgcacgggcaatcgccacacgttgctgctggccgccggagagggtggaaacgcgctgatgggcaaaatgcaccatgccaacgcgggtcagcgcctgtaacgcgcgctgtttctgctcgccggtgaaccagctaaaacaggtgcgccagaacggcgtgctgccgagcgcgccaatcagcacgttctccagtacgctcaggcggttcaccaggttgaattgttggaatatgtagccggtatgggcgcggcttttgcggatatcgcgggccaggcggccttcgcgctggactgtgcggcccagcagctcgatatggctaccgacagatttatcgccggtaatcaaaccgcttaagtgacgtaaaagggtggattttccggaaccgctcggcccaagcagagccaccatttcaccgtgatgaatgttcagatcaaccgcatgcagcgcctgatgctgattgaaggttttggcgagcttctcgacacggataatcgtttgcatgatgcagcctccctaaaaaagtggctccatcgtggcggattattgtgacgatttggttaattaaaagtgactaacagatgaagagttaacgggaattcgatgacagtgcgggagggcgggcctcccggcgggttattgcgttggttgttgtttgacgacattaatcatccacggtacgccaaatttatcggtgactttgccaaagccatgcgcccagaaagtttcctgccaggccatttcgatttttccgttagcggcaagattgtcaaaccagcgttttccttcttcgacctgttggctatcgagcaccagcgtaaagccggagtagctggcttttccactcggcatggcatcgctcatcatgatgtcgcttccggcaatgcgcacattggcgtgggcgatggcggtatcgggaaattgcattccggaagggcagttctcggcgctgtcctgcgcactttttggcatttcgccgaagctgattttatagagcagttccgcgcccaacgtacgttgataataggcaatcgcgtcggaacagttaccggcaaaagagaggtagggacttaacggcatgatggtgacctcagttaagagaagccagttaagtgtagttcgaaatttatacagatgagaggcggcctgataagacgcgcgagcgtcgcatcaggcagtcggcactgttgccggatgcggcgtaaacgccttatccggcctacggagggtgcgggaatttgtaggcctgataagacgcgcaagcgtcgcatcaggcagtcggcaccattgccggatgcggcgtaaacgccttatccggcctacggagggtgcgggaatttgtaggcctgataagacgcgcaagcgtcgcatcaggcagtcggcaccgttgccggatgcggcgtaaacgccttatccggcctacggatggtgcgggaatttgtaggcctgataagacgcgcaagcgtcgcatcaggcagttggcactgttgccggatgcggcgtaaacgccttatccggcctacggagggtgcgggaatttgtaggcctgataagacgcgcaagcgtcgcatcaggcagtcggcaccgttgccggatgcggcgtaaacgccttatccggcctacggagggtgcgggaatttgtaggcctgataagacgcgcaagcgtcgcatcaggcatctggcaccgttgccggatgcggcgcgagcgccttatccggcttaccgatcacaatacaatcagttctttttcacaaactcagatttcagtttcatcggaccaaaaccgtcgattttgcaatcgatgttatggtcgccttcaaccaggcggatgtttttcactttggtgccaattttcagcatgctagagctacctttcaccttcagatctttaatgatggtaacgctgtcgccgtcagccagcagattgccgttagcatctttaacgatcagctcgtcgctttcctgtgcaggttctgcgtcgttccattcgtaggcacattccgggcagatgtacatgccgttatcttcgtaggtgtattcggagttgcattttgggcagtgtggtaaactcatgtggatttcctcaaaagtcagcagggcaaaagcgccaaaaaacggcagattgccgaaaaaggccgcaattatacacaaaatccctgagtttgtcgggggtactgctgattttagacgacgatcgttttcatttgaaaggaaacgcaaaaagaaaataatctttttgcctctatttattatttaagataatgttaatgctctacttgttctttttttaattcacatgatatttttatctttctgacgttttaaacgtatcagaagacgttatttattctgataaaaaacaacacactaaatataaaattatttcttgcagtaattataaaagccgaaaacagaactcaaaaacaatctggctaaataaaataacaaaatttgctttaaggaagaattttctatgtacacacagaccctgtatgagttaagtcaggaggctgaacgcctgttacagctttctcgccaacagttgcagttactggaaaaaatgcctctctctgtacccggagacgacgcgccacaactggctttaccctggagtcagcctaatatcgccgaacgtcacgcgatgctgaataatgagttgcgtaaaatttcccgactggaaatggtgcttgcaattgtcggtaccatgaaagcagggaaaagtaccaccattaatgccattgttggtacggaggttctgcctaatcgtaatcgcccaatgactgcgctgccgacgcttattcgccatacgcccgggcaaaaggaaccggtactgcattttagtcatgtcgcgccaatcgattgtttaattcaacaattacaacagcgcctgcgtgattgcgatattaagcatctgaccgatgtgctggaaatagataaagatatgcgtgcgcttatgcagcggatcgaaaatggcgtcgctttcgaaaaatattatctgggtgcccagcctatttttcattgtctgaaaagtttgaatgatttagtgcgactggcgaaggcgctggacgtcgattttcctttttctgcttacgccgccattgagcatattcccgtgattgaagtggagtttgtccatctagcggggctggagagttatcccggtcagttgacgttactggatacccccgggccaaatgaagccgggcaaccgcatctgcaaaaaatgcttaaccagcagctggcacgcgccagcgcggtactggcggtgctggattatacgcaactgaaaagcatctccgatgaagaggtccgtgaggcgattttggcggtggggcaaagcgtgccgctgtacgtgctggtcaataagttcgatcaacaggatcgtaacagtgacgacgccgaccaggtgcgggcactgatttccgggacgctgatgaaaggctgtattacgccacagcagatatttccggtgagcagcatgtggggctacctggcgaatcgggcgcgctatgagttagccaacaacggtaagttaccaccgccagagcaacaacgctgggtggaagattttgcccatgccgcgcttggcaggcgctggcgtcatgccgatctggcggacctcgaacatattcgtcatgctgccgatcagttgtgggaagatagcctgttcgcccagccaattcaggcgttgcttcatgccgcttacgctaacgccagcttgtatgctctgcgatctgccgcgcataaactgttgaattacgcgcagcaggcgcgggaatacctggattttcgtgcgcacgggttaaacgtcgcttgtgaacaattgcggcaaaatatccaccagatcgaagaaagtttgcagctattgcaactcaatcaggcgcaggtgagcggcgagattaaacatgaaatcgagctggccctgacctccgccaaccactttctgcgtcaacagcaagatgcgctgaaggtgcagttagccgccttgtttcaggatgatagcgagccgttaagcgagattcgtacccgctgtgagacactgttacagacggcgcagaacaccatcagtcgcgactttacgctgcgttttgccgagcttgaatccaccctttgccgggtgttaaccgatgttattcgccccattgagcaacaagtcaaaatggaattgagcgagagtgggtttcgtcctgggtttcattttcctgtttttcacggcgtagttccccacttcaacactcgccagctgttcagtgaagtcattagccgccaggaagcaacggacgagcagagcacgcgtttaggcgttgtgcgtgagacttttagccgctggttgaatcagcccgactggggacggggaaatgagaaaagtccgacagaaacggttgattacagtgtgttgcaacgagcattaagcgcagaagtcgatctctattgccaacaaatggctaaagttctggcagagcaggtcgatgaatctgttacggcaggcatgaatacttttttcgctgagttcgctagttgtttgacggaattacagacgcgtttacgcgaaagtctggctctgcgtcaacaaaatgaaagcgtggtcaggctgatgcagcagcaattgcagcagactgtgatgactcacggctggatttacaccgacgcccagctgttacgcgatgatattcaaacacttttcacggcagaacgatattgaccaagacgttacttgacggccccggtcgcgtgctggagagcgtttatccccgctttttagtggatctggcgcagggtgatgatgcccgccttccacaagcccatcagcagcagtttcgtgaacgactgatgcaggaacttcttagccgtgtgcagcttcagacatggacgaacggcggcatgttaaatgcgccgcttagcctgcgtctgacattggtggaaaaactggcgagcatgctggatcccggtcatctggcactgacgcagatcgcgcagcatctggcgctgctgcaaaaaatggatcaccgccagcactctgctttcccggagctcccccagcaaattgccgccttgtatgagtggtttagtgcccgttgtcgctggaaggaaaaggcgttaacgcaacgaggcctactggtgcaggcaggtgatcagagcgagcaaatttttacccgctggcgtgctggggcgtataacgcctggagcttgcctgggcgctgttttatcgttctggaggagttgcgctggggggcatttggcgatgcctgccgtctgggaagcccgcaagcggtggcgttgttgctgggtgatttgctcgagaaagcgacacaacatctggcagagagtatcaatgcggcaccgaccacgcgtcactattaccatcagtggtttgcctctagcaccgttccgacgggcggggagcatgctgattttttaagttggctgggaaagtggaccacggcagataaacaacccgtttgctggagtgtgacccaacgctggcaaactgtcgcgctggggatgccacgactctgtagtgcgcagcgtctggcgggggcaatgctcgaggaaatcttctctgtaaatttggcgtaaataatcagttacatcaatgagtcctaaacgaaatccatgtgtgaagttgatcacaaatttaaacactggtagggtaaaaaggtcattaactgcccaattcaggcgtcaactggtttgattgtacattccttaaccggagggtgtaagcaaacccgctacgcttgttacagagattgcatcctgcaattcccgctccccttttgcggccgtcgcgctgatttttctggcgtttgcggaaatgggccaactctgcgaggaaagctatgctgaaaaggaaaaaagtaaaaccgattacccttcgtgatgtcaccattattgatgacggtaaactgcgtaaagccattaccgcagcaagtctgggtaatgcaatggaatggttcgattttggtgtttatggttttgttgcttacgcattaggtaaagtttttttcccgggggctgaccccagcgtgcagatggttgctgcacttgccactttctccgttccctttctgattcgaccgcttggcggactcttctttggtatgttgggcgataaatatggtcgccagaagatcctcgctatcactattgtgattatgagcatcagtacgttctgtattggcttaataccgtcctacgacacgattggtatttgggcaccgattctgctgttgatctgtaagatggcacaaggtttcagcgtcggcggtgaatataccggggcgagcatatttgttgcggaatactcccctgaccgtaaacgtggctttatgggcagctggctggacttcggttctattgccgggtttgtgctgggtgcgggcgtggtggtgttaattagcaccattgtcggcgaagcgaacttcctcgattggggctggcgtattccgttctttatcgctctgccgttagggattatcgggctttacctgcgccatgcgctggaagagactccggcgttccagcagcatgtcgataaactggaacagggcgaccgtgaaggtttgcaggatggcccgaaagtcagctttaaagagattgccactaaatactggcgcagcctgttgacatgtattggtctggtaattgccaccaacgtgacttactacatgttgctgacctatatgccgagttatttgagccataacctgcattactccgaagaccacggggtgctgattattatcgccattatgatcggtatgctgtttgtccagccggtgatgggcttgctgagtgaccgttttggccgtcgtccgtttgtgctacttggtagtgttgccctgtttgtgttggcgatcccggcgtttattctgattaacagtaacgtcatcggcctgatttttgccgggttactgatgctggcggtgatccttaactgctttacgggcgttatggcttctaccttgccagcgatgttcccgacgcatatccgttacagcgcgctggcggcggcatttaatattagcgtgctggttgccggtctgacgccaacgctggcggcctggctggtcgaaagcagccagaatctgatgatgcctgcctattacctgatggtagtggcggtggttggtttaatcaccggcgtaaccatgaaagagacggcaaatcgtccgttgaaaggtgcgacaccggcggcgagtgatatacaggaagcgaaggaaattctcgtcgagcattacgataatatcgagcagaaaatcgatgatattgaccacgagattgccgatttgcaggcgaaacgtacccgcctggtgcagcaacatccgcgaattgatgaataagctgaaacggatggcctgatgtgacgctgtcttatcaggccaattgaactcttaaggttcacttaatctctgacgcgcatactctcctccaggttaacggaggagagtgcaatgaaaaaccgtgtttatgaaagtttaactaccgtgttcagcgtgctggtggtcagcagctttctttatatctggtttgccacgtactgatctttcttcagccgtacccaggcccgcgtgccggaagtctcttgccggttttgcaggaaaaactgcccgtgatgcaactgtgtaatgcggctgacaatacttaaccccagaccaatcccgccataacggctgtccatacgtacaaacgctttactcaactccccgcatttactctcatcaatacctggtccttcatcttcaactgccatgaccgctccgtcatcttcttgcagcttaatcataatgttgctgccttgcgggctgtaacgatgggcgttttctaccaggtttcgcaataacatccgcagcagggttgcatcaccctgaacggtgatgtcggcggcgctctctggcaatagcagggtttgctgtcgctggtcgagcatggtactgagttcgtcatagctggggagaatgacatcttccagcagttttacatgttgataattaccggaagaaaaactctgtccggcacgcgccagttgcagcagctgggagacgctctccatcatctgatcaagccgtgccactaacggtgctacatcaatgtgatgcgttttcgccagcagttccagatgcaaacgcacccccgccagtggcgttcgcagttcgtgcgcgacgtcagcggtaaacaacctttcgttatccagcgtgctggtcaggcgactgaccagatcgtttaacgcgctaaccaccgcttcgatttcgagggtggcgctgtgaatggcaatgggcgttaagttgtcggcggtgcgcgcttccagctctttttgcagctccgccagcgggcgggtgatgcggcgtaccgcctgatagcagataaatagcgtcaggctgaccataaagacgccggggacaatcaggctggcgaccgcctcgcggatctcacgcatgatgtggcgatcgttgttgcgattgtcgcgtagcgcctgctcaaacagctgaatctgctcggtactttcatgccatagccagaagacgctgatcagctcaaacaccaacaaaatggccccgatggtcaatatcagccgttggcgcaggcttattggtcggcgcagaaaatgcatcagattcaattagttttcctcattcgcgaccagcatatagccaaagccgcgcacggtgcggatacgggctttgcccactttgtcgcgcagattgtggatatgcacttccagggtgttggtgctgggttcattgtcccagttatagatgtcgttgtagagaatttcccgatgcaccggactgcctgctttgagcattaaccgactcagcagagcatattctttgggcgtcagaatcaactcttcaccgcccatccatacctgacggcgacccatgttcagcgtcagattgccaacaatcagctcactttcgccctgattattatggcgtcgtagcagggcgcggatacgggcatgtaactcttccagcgcaaaaggcttcaccagatagtcgtcggcaccgacatccagcccggcgattttgtcggtcagcgtatcgcgagcggtgaggatcagtaccggcagggtatattttttctgccggatacgggcgagaaaatgcagtccatcttcgtcgggtaaccctaaatccagtaccaccaggctgtaatgacctgcctcaaggctttgttccgccatccgcgcggttgtcacgctatcgcacgcgtagccttcggtttgcgccgccagaatcagtccctgcaataacagcgtatcgtcttcaacaatcagaattttcattcactcactctcctgcaagtttgcagaatatcatccgcagcctggtaatacttcgtctcaacgccagttaatcccaatagcgtggagaataaattgtcttgactatagtgttgcgtttgcgcctgtttttgcaggcagttctggtcaacctgataccgtttttgataatcctcgctcagccacagcagcatcggcacctgtttttggctatccggggcgatggcataaggcagaccgtgcagatagatgccattttcacctaagctttcaccgtggtcagaaagataaaccaggctggtggtaaatttatcctgatgttctttcagcagattaatcgctttatcaacaatatagtcgacgtaaaccagcgtgttgtcgtaagtgttcaccagttgctctttggtacaggtctggatctcattggtgtcgcaggttggggtaaatttcctgaactgaggcggatagcggttgtaataggtcggaccgtggctgccgatggtgtgtaagacaatcacgccatcaccttgcaggttattgatgtactcttcaagcccgtggaacagcacttcgtcatagcattcgccgttgatgcactgatcaggtagattcagcgcggtgacgttctggtgaggcacgcggtcgcaggcacctttacagccgccatcgttgtcattccacagcacgttgatgcccgctcgctgaatgatatccagcacgccttcctggtgctgtgccagctcttctttgtagtgctcacgcggcatatcgctgaacatgcacggtacactaactgccgttgccgtgccgcaagatgcggtattagggaaatagaccacgttatctttcgccagccgcgggttagtttcacgcgggtagccgttgagggagaagttctccgcccggctggtttcgccgacaatcaggatggtcaaatttttacgtttttcgttctgcattaacgggttgcggtgcgcgtcttcaccaattcgcaccagcggcagatttgccagtcgctgatgggagtaccaactccagctggcaacaatgctgttagaggggcttaaggatttcaccagctctttgttattgcggaacaagctggcgtagtctttataaaacagtgcggcgaccagcaaaatcagtagtacagaaaccagaatattggctccacggaaaagaacactgcgcagacggctggtggcaggtttgatttttatccagcaggcaatcagcgcagcaagcacgccgctgaatcccagcgttaataacatttgcggtgtcatcagcgcataactttctgccggagtggtatcaataatattggcaatcatgctgcggtcgatgacgatgccgtaagtcattatgaaatattgtgcagccgcgccaaccagaataaacaggcaggccagtggtcgattaagccataagaaagagcttagtgtcaggacaatattaatcacgctgaaagcgacgaccggcatgctcaagaaaaccagtacgttatgcaggctatccagcggcagcgcctgcaacacctgtttaaaaaaggcaatattcaggcagatagagatataaaaagcggccaacaatagccaggcgagtaaattcaaagagggtctttttagtaggcgcttcaacatcacggtgtttccatcgaacaaagtgcgcatatgctcgcaaagcaaaattaagccaaccttaagttcttaaggttggcttttatgtttgctggattaaggggaattaatctttgcttattggtgcatctaagggatacgggtttttatgtagccggttgtaattcagcgcatacatggcggtgatgaccatcagggtgacaaaactccacataacctctttcgctccggaccccaccacggcccagatgcagtagaggaaggcaatggtagtaactgccagatatgccgggcgtgctttaccaaagtgaccgtgtccgagcagcagtaacgccgcacaggtgtaaagatatggcaccagtgtaaagatgacgctgacggaagaaaccagaccgaactctttggtcgcgtttggactaatgctgctgagctggaagatggtcatcaaaataccgacgataatcagccccgccactggcgtacccgctttatttacacgggcaaaaatcggtgggaacagtccgtcatcggcagcggctttcgccgtttgacccgccagcaacgtccagccgcccagactacctaagcaacccgcagctgcgcagaaggaaacaatggccccggcggtgtcacccaacgccatccgtgcggcatcaccgaatgggctagcagaaacgcgcagtgcggcattagggatcatccccataatcgcggtggtagaaagtacatagcaaacggcggcaatcaataccccaccaatggtggcgatagggacattgcgtttcgggtttttcaccacacctgcggcaacggaggcactttccacaccgatgaagctccacagcgtaacgttaagggtactttgaattgcaccgaaggtgcccaggccgctgacgttccatgccgccatataggtttcaccacggaaccagaaccagccaaatacggcaatcccgacgatggggatcagcgccagcacggtggcaactgcctgcacacgggtgatcattttcggaccgacaatgttcagcaggacgaagatccacagcaccacgacgcaggtgatggttaataccaatggatctttcagaatcgggaagaagtaacttaaatatcctacgccaatgaccaccatggcgatattgccgatccagcaggccagccagtagaggacgttggtttgataaccgagaaacgggccaaagcagcggcgggcgtaagcgtaagaaccaccaggacttgggtcgaggaagctcattttggcgtataccatgctgagccccagtgcaccgataatcgtcaccaaccatccataaatggcaatcccgccagtagaggccaggtttgcaggtaacagaaaaacaccactccccataatattcccgctcaccatcagggtgacggggattaagcccactttgtgagcatcagcatcgctagacataattaaactcctgcgaaggcgagcttcgtgacaataaattacgtcatatcatacgcctgcattcgatagttgaattattatcgaccgggttatcgctgatgccgttattaatatagctcttcgttaaggttaaaaatcaggcgacagtgcgttctctgtgctgactaacataatgcagcggcgtcataccgtagaagtctttaaagacagaaataaagtagctcgtactgttgtagccgcaggactgacttacctgagagatatttttaccgtccatcattaattcatttacggcataacgcatgcggcaggtggtgattatttggctataactggtgttttcgcttttcaactttttctttaacagacttgggctaagacataaacaactggctaccatactaagattccagtctttgtgaatatcgctttcaataatttgataaacgctgtcacttacacaattacgtaacatatacatcattaaactaacgaattttttactgtcgagaaaacgggatagcaccgtgaataataatgcgcgtgttcgttccttttcactctcagtttctgcgggcatcatgctgtgttgcgcggcaacgcgaaagacgtctggcgtcaggcatggcagggtgagtatgggcgtagcgctacgttgccatactggtatttggctgagatctttattcagaaaccggaggtaatctttgatgatgtcgtgactaatatgagcaaccaaagtgttgttaagagaggagacgtcgataatattattttcacaatttaataacgccatatggttagctttaaggctaataggttctttcccattcacccttatccagacatctttttcagtcaataaaacaatacaaggttggtcgctgcaaatcctcatacatgtactcctgagtgcgaataaaagaccagttctcgctaaagcaaagcgataccgggaaatggttatataattgtatgatgaatataaacatgcataaaaataacgagttttactaatagtacaaatttttatagtaatttctcatgtacatatttttttacaggataaataacaggcaaaaaaaagcgcggggtggggccgcgcaaaaagtatgacatttttgtttgcagcaatttttatgaaaacgttgccatactcaaaaggcctaaggccaggcggcgtaatgttatttaaacaattacgccttcagcggaatagtggttacgctttcacgcacataacgtggtaaataccgtcaataatttcagtcccttcagtttcgtgttcaaatccagggaaatggtggtcccaggattgcaggctgcgtaaataacttacttgcggactgtttttatcgccgaagttttcaccagacagcagcatcgggattcctggcggatacgggataacactgtttgccgcgatgcgtcctggcagattttcaatggataccagttcgacattgttgtcgacaatcgcgttgtacgcttcacgcggggtgacttccgccaccggcaggccggaataggcttcgttcaaccgtgcgccagggttgttttctttcagccaggcaaacatggtgtcacccagatcgtgaatccccatgttcgcgtaagtgtcaggatattgttcaacaagttccggcatcacctgcgccagcggtgtgttggcgtcatagtggcgtttgaaggagcaaagggtgttaaccagagttccccatttcccacgggttacgcccatagagaacaggaacataatttggaagtcagtggtgcgggtaggtacaatgccgtggcgaccaagccaggcagtgaccagcgccgccggaacaccggtttcttccagttcaccatcttcacccattcccggagcaaggatgctgactttaatcgggtcgagcatactccagttatccggaatatctttgaagccgtgccagctttcgcccggatgcattacccagcagtcctgaacggtggtcagcagtttggttggtgcgtcagcaaagtcataggttttgccggtttgtgggtcggtgacgacttctttgttccacggtttgaagaaccagctaccgtcagcggtgaactctttatatagccgcgccatcgcctgacggaaatcaaccgcttcgtcaatcacttcctgtgtcagactcaggccgctgttgccgtccatcatgctcaccgccacgtcgttggatgcgcagatggcatacagcggggaggtggtggcatgcatcatgtaggcctggttgaagcgggagaagttaatcgccccacgaccttcacgtacatgaatataagaagcctgactcagcgcattcagcagtttgtgggtggagtgggtggcgaaaacggtaggaccgttgtgatcgccaggttcgccgcgcatggcatagtgatcggcatagatcgggttgaaacgtgcatagccgtaccaggcttcgtcaaagtgcagacgatcggaggttttttccagcagatcctgcgcttctttagcgttataacacacgccgtcataggtgcagttggtcaccacgcagtaagacggtttttgcccggctttgtctttggtcagcgggctttcactgattttcttctgcaaggtttcaggttgcatttcctgcggatagattggcccgataatgccgtagcggttgcggcttggcaccatatagaccggtttcgcgcctgtcagcatcaaaccttgttcgatggatttatggcagttacggtcaacgaccacgacatcgttatcggtcatgcaagcctgcatgatggtgcggttagagccggaagtaccgacgactacgctccaggagcgatcggcaccaaatacgcgtgcggcatatttttcgctttcgccaaatgcgccagtatggtcaagcaaagaaccgagggaagttcgttcgatgcccatgtcggtgcggaacagattttcaccatagtagtcatggtagaaacgtccggcgggtgttttggtaaaaccaacgccgccctggtggcctggcgctgcccaggaatattcatggatgtcactatatttcatcagcgcgctgaacagtggcggcaacagctgctggcggtagcgggtcatcgcggcaacggcgcgtccggcgataaagtcggcggtatcttccagaatccaggcgaattcatcgacaagctccagcaggtcgcgatccattgcggcgagggctttttcccgatcgcccaacaggaagaccggcacgttttgttggcgctcatgaagcttaccgatcaattgtctgacgttttgatgttcgtccggatgttccatttgatagctgaacatcaggcagtcaatggcttcgttactagagagaatggcaaaaccatcatcaaaggaggtggatttaatcacggtaacattttgctggcttaaagcatctgccagacgctcaacggcgttaccgacccaggtgtcttgatggagaaactcgctttcaacaattaatactttcatcattgcttacccggttatgaaggaatcttcgttgcgggcaagtatcttccggccttttcgggctgtaaagcgcgtgaaaaacaaacatttttgaaatatttagttttataaacaatacgttatgtgattattttaaattattttcactgcttattatcgacggctaaactatttttttggctgatactgatatcgtctttagccgggaaacgtctggcggcgctgttggctaagtttgcggtattgttgcgggctcatgccgacatatttgccgaacgtgctgtaaaaacgactactactacgaaagcctgccgtcagggcaatatcgagaatacttttatcggtatcgctcagtaacgcgcgaacgtggttgatgcgcatcgcggtaatgtactgtttcatcgtcaattgcatgacccgctggaatatccccattgcatagttggcgttaagtttgacgtgctcagccacatcgttgatggtcagcgcctgatcatagttttcggcaataaagcccagcatctggctaacataaaattgcgcatggcggctgacgctgtttttgtgtgtgcggctggttttattgaccagaatcggttcccagccagagaggctaaatcgcttgagcatcaggccaatttcatcaatggcgagctggcgaatttgctcgttcggactgtttaattcctgctgccagcggcgcacttcaaacgggctaagttgctgtgtggccagacttttgatcaccatgccgtgagtgacgtggttaatcaggtctttatccagcggccaggagagaaacagatgcatcggcagattaaaaatcgccatgctctgacaggttccggtatctgttagttggtgcggtgtacaggcccagaacagcgtgatatgaccctgattgatattcactttttcattgttgatcaggtattccacatcgccatcgaaaggcacattcacttcgacctgaccatgccagtggctggtgggcatgatatgcggtgcgcgaaactcaatctccatccgctggtattcgctatacaggctcagcgggctgcgggtctgtttttcgtcgctgctgcacataaacgtatctgtattcatggatggctctctttcctggaatatcagaattatggcaggagtgagggaggatgactgcgagtgggagcacggttttcaccctcttcccagaggggcgaggggactctccgagtatcatgaggccgaaaactctgcttttcaggtaatttattcccataaactcagatttactgctgcttcacgcaggatctgagtttatgggaatgctcaacctggaagccggaggttttctgcagattcgcctgccatgatgaagttattcaagcaagccaggagatctgcatgatgtctgcacccaaaattacatttatcggcgctggtagcacgattttcgttaaaaatattcttggtgatgtgttccatcgcgaggcgctgaaaacggcgcatattgccctgatggacattgaccccacccgcctggaagagagccatattgtggtgcgtaagctgatggatagtgcaggggccagcggcaaaatcacctgccacacccaacagaaagaagccttagaggatgccgattttgtcgtggtggcatttcagattggcggttatgaaccttgcacggtgactgatttcgaggtctgtaagcggcatggtctggaacaaaccattgccgatacgttggggccgggcggtattatgcgcgcgctacgtaccattccgcatctgtggcaaatttgcgaggacatgacggaagtctgccccgatgccaccatgctcaactatgttaacccaatggcgatgaatacctgggcgatgtatgcccgctatccgcatatcaaacaggtcgggctgtgccatagcgtgcagggaacggcggaagagttggcgcgtgacctcaatatcgacccagctacgctgcgttaccgttgcgcaggtatcaaccatatggcgttttacctggagctggagcgcaaaaccgccgacggcagttatgtgaatctctacccggaactgctggcggcttatgaagcagggcaggcaccgaagccgaatattcatggcaatactcgctgccagaatattgtgcgctacgaaatgttcaaaaagctgggctatttcgtcacggaaagcagtgaacattttgctgagtacacaccgtggtttattaagccaggtcgtgaggatttgattgagcgttataaagtaccgctggatgagtacccgaaacgctgcgtcgagcagctggcgaactggcataaagagctggaggagtataaaaaagcctcccggattgatattaaaccgagtcgggaatatgccagcacaatcatgaacgctatctggactggcgagccgagtgtgatttacggcaacgtccgtaacgatggtttgattgataacctgccacaaggatgttgcgtggaagtagcctgtctggttgatgctaatggcattcagccgaccaaagtcggtacgctacctagccatctggccgccctgatgcaaaccaacatcaacgtacagacgctgctgaccgaagctattcttacggaaaatcgcgaccgtgtttaccacgccgcgatgatggacccgcatactgccgccgtgctgggcattgacgaaatatatgctcttgttgacgacctgattgccgcccacggcgactggctgccaggctggttgcaccgttaaaacgcgactaaacgctactgcgccgggggatttattccggcgcacacctctgacgataccaataacagaaggcgggcgttggtaacagcgacccgataccctatgagcatttcaatgactacaaaactcagttatggatttggagcgttcgggaaggattttgcgatcggcattgtgtatatgtacctcatgtattactacaccgatgtcgtcgggctgtctgtgggtttggtcggtactttgtttctggtggcgaggatctgggatgctattaacgatccgattatgggatggattgtaaatgctacgcgaagccgatggggtaagttcaaaccctggatcctgatcggtacgttggcaaactctgtaatcttatttctcctctttagtgcgcatctgtttgaaggtactactcagattgtctttgtttgcgtgacctacatcctctggggcatgacttacaccattatggatattcccttctggagcctggttccaaccatcacgctcgataaacgtgagcgcgaacaactggttccttatccgcgtttttttgccagtctggcaggctttgttacggcaggtgtgacgctaccatttgttaattatgtcggcggtggcgatcggggatttggctttcagatgttcactctggtactgatcgccttttttattgttagtaccatcatcactctgcgcaatgtgcatgaagtctttagcagtgacaatcaaccgtctgctgaaggaagccatctgacacttaaagccatcgttgcgctaatttataaaaacgatcagcttagttgcctcttgggtatggctcttgcttataatgtagccagcaacattattaccggctttgctatctattatttcagttatgttatcggtgatgcggatttgttcccctattatctgagctatgcgggagctgctaacctggtgacgttagtattcttcccacgcttagttaaaagtttatcccgacgcattttatgggccggagcatctattcttccggtgttaagctgtggtgttctcctgttaatggcattaatgagctatcacaacgtcgtcctcattgtgattgcgggtattttgctgaatgtgggaacggcgcttttctgggtattacaggtcatcatggtggcagatatcgttgattacggtgaatataaactgcacgtacgctgtgaaagtatcgcttactccgtgcagactatggtggtgaagggcggtagtgcctttgcggcttttttcattgcggttgtgttagggatgattggctatgtaccgaatgttgaacagtctacgcaagccctattaggtatgcagtttattatgattgctctaccaactctgtttttcatggtaacgctgattctctacttccgtttctatcgcctcaatggtgacacgctgcgcaggatccagatccatctgctggataaatatcgcaaagtaccgcccgagcctgttcatgctgatattccggtcggtgcagtgagtgatgtgaaagcctgacgtggacaatagctaacgaaaatggcctgatgcgatatgtttatcaggccacgtcttaatgtaatgctttggatttgcaaattttgtagaccggataaggaattcacgccgcatccggcatcaacaaagcgcaagttgttatccggttatcaagccaaagcgccgtagctggcggcaatgaaagcgagcgaggaatatcaccgtcgttaatgcgccaagcagcgcgcagaacatatcggattgcgtgtcccactggtcgccctgggtgccgagaaaatcatccgctccctgacccattgccagcgctgcccaccactcgattaattcatacatcgcgcttatcgccagcgccacgcagcagaccaggaacgccaccattttacgtccgcgcacgtacatcccgcgaacgagaatttctcgtgccaccagtgcaggcaccagcccctggaaaaagtgccccagcttgtcatacggattacgactcaaccccagccattcctgcacctcaaaaccaacggggactttcgcgtaggtgtattgtccgccgaccatcaggatgatggcgtgaaggaaaatgagcgtatagagcagcggcgttaacggataacgtctggcggtggcaagcagtagctgcacgacaataatcaccggtgtcacttccatcagccaggtgagtttgtcatgggcgctaatgccggtataaatcaggattaacgttagcgtcagtgcgctggtgttaagaattaacggcttgagtgtgcgggtcatggtgagttcgcaaatcagggaaaatactgactattcaccagcaagcgtgaaattacaatcgcaaaagaggtggccagggggatcacctggcagcatgctgccaggcgctgggccgaagaggttacttagtgcagttcgcgcactgtttgttgacgatttgctggaagaagtcgttacctttgtcatcgaccaggataaacgccgggaaatcttctacttcgattttccagatagcttccatacccagctccggataagcgacgcactccagatgcttgatgctctgctgcgccagtaccgccgccggaccgccgatgctaccgaggtagaagccgccgtgtttatgacacgcgtcggtaacctgctgactgcggttacctttcgccagcatgatcatgctgccgccgtgggattgcagcagatccacgtaggagtccatacggcctgcggtggttgggccaagactaccacttggataaccggcaggggttttcgccggacccgcgtagtagatcgggtgatctttgatgtactgcggaagttctttaccggcgtcaatcagctctttcagcttggcgtgtgcaatatctcggcccacgataatggtgccggtgaggctcaaacgagtggataccgggtattggctaagctgggcgaggatctctttcatcgggcggttaaggtcaactttcaccgcttcgccttcaccggcctggcgcagttcttgtggaatgtactggcctgggttgtgttccagtttttcgatccagataccttcgcggttgattttcgctttaatgttacggtcagcggagcaggagacgcccatgccgaccgggcaggatgcgccgtgacgtggcagacggataacgcgaatgtcgtgcgcgaagtatttaccgccaaactgcgcgccaagaccgagtttctgggcctcttccagcagttcctgttccagctggacatcgcggaacgcctgaccatgttcgttcccttccgtcggcagttcatcgtaatagtgagcgcttgctaacttgacggttttcaggttggtttccgcagacgtaccgccaatcacaaacgcgatatggtacggcgggcaggctgcagtaccgagggtacgcattttctcgacgaggaagtttttcagtttgccgggagtcagcagggctttggtttcctggtagagatacgttttgttggcagagccgccgcctttcgcaacgcaaaggaatttgtactcatcgccatctaccgcgtacaggtcgatttgcgcaggcaggttagtgccggtgttgacctctttgtacatgtccagcgccgcattctgactatagcgcaggttatcttcgatataggtgttatagacgcctttgctcagcgtttcttcatcaccgccgccggtccacacgcgctggccttttttaccgacgatgatcgcggtgccggtatcctggcaggtcggcagcacgcctttggcggcgatttcggagtttcttaagaattgcagcgccacgtacttgtcgttttcgctggcttctggatcgtgaagaatagccgcaacctgtttctggtgtgccgggcggagcataaaagaagcgtcgtgaaaggcttgctgcgccagcagggtcagggcttctggttccactttcaggatggtttcgccgtcgaagtcggcaacgctaacgtaatcggaagtgagtagatagtattcggtattgtctttccccatcgggaaaggtgcctggtagataaagggtttgttactcatagcttccagcctgtaactctgtatttgttattcgaaaatggcgtgccgcgtagtcacgggcggcacgcaaagtgcatttataagaacccgtacatcgcggcgaagatccagccgaagacgcagcttacgctcacaccaatcaaccccggcagaataaagctgtggttgatgacgaagcgaccgatgtgggtggtgccggaacggtcaaactgaatcgctgccagatcgctcggataagtcggcaggatgtaataaccgtagcaagccggtgcactagccacgatgtatgccggatcaacgccgatcgccagcgcgaccggaacaatcgccgccagcgccgcagcctgagagtttacaaacttggaaaccagcagcagaacaatggcataggcccacggatactctttcaccatttcacccagtacgccctgaatttcagacatatgcgcaccgaacatggtttctgccatccatgcgataccgtacaccgccacgatggcgatcataccggaacggaagacttcgtttttactgatagacgcgggattggttttggtcaggataataatcagcgccccggtcagcagcataaacatctgaataaccagtaccatgctcagcggtttgccgccgaaggatggacgcaggtcgctatcagcaccaagaagggcgactacagcgattgccccgaggaaaatccacattgccagccagttgcttttcggcagttttttatccagcagcgtcgcggtatcaccgtaaacatactcacggttttccggtacggagatgaatttctggaactcttcgtctttatccagatctttaccgcggaaccagctgaagataccgatcgccaggataccgattaacgtgcttggaatggtgattgccagcagatcgaggaactcaagatggcgaccatcaaaggtgacattacccagcatcgcaaccagagacacgaccgcaacgctcaccggactggcgataatccccatctgtgcaccgatagaacttgccgccatcggacgttccggacggatgttgttcttaatggcgacgtcgtagatgatcggcagaatggtgtaaaccacatgacccgtaccgcaaagaatggtcagtgtacaggtcacaaacggcgcgacaatactgacatatttcgggttgcggcgcagcagcttctcggcaatttgcagcatgacatcaagaccgccgctagcttgcaaggtcgcgcttgccgccaccaccgcaatgataaccagcatgacatcaactggtggtttacctggctgaaggtggaagacgaagaccagaatgaccagaccgataccgcctaataaacccagcgcgataccaccctttctggcaccataaaacagacatatcagtattatgataagttggatagtaaataacatgtgtgaaccctcgcgataatcctatttaaatttttgctgaatagatcacagtcacgttctgttttgtatgaactgttttcagagcctgactaaatatccgtttggtcgttaccggctttagcaaatacctcacagtgaatattggctgattaaagcagcggcaaatttatgcactgtgataagcggctttttcagagagaaagactctctggcgatgggtttatagtttgtactgcgcagatgttaatgttttgtttgctgttatcttattgatatttatcggtctattttttgttctcagggcagatgtcattaggtttatagattaatctgatctacccatttgtgggtaaaaatacacataatgcgggtgacataatagttaattaacttttgttagcgttttgaaattaaaaacaccgttcacctgaagagatattaatttttagcgatgatggagggataattatatttgatctggcacaagttttactgatgaaggatgtaacttgtgccaggggtattttgcattacggtaataattattacttacagataaccagcgatccgttattggcaatattgtttcagtagactgtagtgttctgcctgaatacggtaacggtaaactggacgccccgtgacgccataatggatactggtgaacaagatgtggcagttgaccagccagatgaggtatttacggcaggaaacacggctaatgttaacctcgttggctagctcgtcggtactaaattcatagtcctgatgcgcgtcaatccactggcacagtgtgcgtaacgtctgcggcgttaagccttttggcaagcgacgaggatcctgttcgttggagctgctgccgtggattagctgatcaagctcggcctggtcataatactgatgtttttccagcgccattttcttttgccgccagccggtgagcgcctcttcaaagcgggaagcctggaagggtttgatcaggtaatccacgacaccgtaatgcaggctatctttaatggttgccgcatcggctgcggaggagatgacaatcacatcacttttgcaacgcgcgttatgcaggacaggcagtaaatcgagcccgttctctttttgcatatagatatcgagcaatatcaggtcgataggcgtatcgctattgaagataatctctttggctttctccagcgtgctggctgttccacagcattgaaagcctgggatttgtgctacgtatcggcgattcagctccgcgaccattgcgtcgtcatcgataattaatacattgatcatctgttgctcctctccccgtcccagggtatctggacaaaaaattgtgtgaaaatcccgggttcgctttccacggcgatgctgccgccgagattttctacctgttgtttgacaagtgctaaaccgacgcctcgctcgcttccttttgtgctgacacctttgtcaaaaatgtgatcgattttatcgggtgcgatccccggtccatcatcattaacttcacagtgcagccagccgtgacggtagtgcaatgttacgctaatttcgcctccgggttccggccctaatgcctccagcgcgttttctatcagatttcccaacgtggtaatcagcgtcgcgacctggtcctcactgccgctgtctggcagctggctttcactgtttaaaatcagcgtatggcctaaatcggtcgcgcggttaatcttgctgattaaaaaaccagcgataaccggagatttgatcttacccagcagagagccaatctcttcctgatagttattggctgttttgagaatgtaatcttccaactgcttataactcttcagatgcaataatccgagaatcacatgcaatttattcataaattcgtgggatcgttcacgaagtgcgtcagcatagttgaccagaccgtcgagtcgctgcatcagtttacgtacttcagttttgtccctgaaggtactaatggcaccgatgataacgccattactgcgcaccggaacggtgttgatcagtaatagccggtctttaatcgtaatctcttcgtcgcggcgcggggtaccgtcgcgtaacacttcgctgacatctaccacctgactccaactgtggcttagcgtgctcagtttctcatcgtcctggctcttacggtaattcagcaattcttgtgcggcatcgttgatcagcgtgacctcgccgcgatcgtccacggcaacgacgccttctttgatagactgcaacatggcctggcgttgctcaaacagcgtggagatttcgtagggttccaggccgaaaaggatttttttcagtaccttaaccagaatgcaggtgccaatcagtccgaccagcatgccaaataatacgctccagataatgctccagcgactgtcattgatctgttgggtcacacggcttaactcaaggccgatcgccaccacgccaatttgtttatgattttcatcgtagatgggggtaaatacgcgtaaagcctgcgccagaaaaccgcgattgatagcgacattttcttcgccattcagcgctttaaggatgtcatcacctttaaatggctgaccaatacgctgggcttcaggatggctgtagcgaagactttgcatatcggtaacgacaataaacagcagatcgttgcgtttgcgtacggcttccgcgatggcctggatgccactctcctgcggttttttctgcaagccctgacggatttccgggctgtcggcgagggtacgcgccactgccagtgccttgttggctagcccatctcgcgtcatatcactgatttggctgaagtaaatcagatgcaccaccaatagcacgctgaacagtaccgcactgaccattaagatcactgtggtactcaatttcatcggacgtttgcgtaacatgcggtagggcaaactatgtctcatcagcttccttgtgtgacaaatttcttaagcattatctctgatgaggcgggtaattcaaagggagtaagaatgattggctatataggggaagagactctggcaacggaaactgccagtgctgtatgaagattccggggctatgcttatagcgataatcatactgatgagagagggaaggtcatggatcaggcgctactggacgggggttatcgctgttataccggcgaaaagatcgatgtctatttcaacactgcgatatgtcagcattctggcaattgcgtacgtggcaacggcaagttatttaatctcaaacgaaagccgtggatcatgccggatgaagtcgacgtcgccactgtggttaaagtgattgatacgtgcccgagcggcgcgctgaaataccgtcataaataagcgagggtaaaatggaaatacgcgaaggccacaataaattttacattaatgacaaacaaggcaagcaaatcgctgaaattgtctttgtgccgaccggagagaatttagcgattatcgaacataccgatgtcgatgaaagcctgaaagggcaagggattggtaaacagctggttgcgaaagtcgtggaaaaaatgcgtcgggaaaaacgaaaaattatcccattatgcccatttgcgaaacatgaatttgataaaacgcgggagtatgatgatattcgcagttgatgggagagtacagagtcacgatatttttcattctctccgcgatgtgatgcaggagagcatctgaagggtagggggatgcacaaagaatgggcagagagcgcgtttttttgtcccaagtcatcccctttactgagcaaaaaaaagaatatctcctatatgagaatcatcaatcggggttaataagttttgcgtccccagagcgtttaatattgataggagtcatattatggaaggtaaaaacaagttcaatacttatgttgtttcttttgattatccaagttcttattccagtgtgttcttaagattaagaagtttgatgtatgatatgaatttctcctctatcgtggctgatgaatatgggataccacgacaattgaatgaaaactccttcgcaataacgacaagcttagccgcaagtgaaatcgaagatttaatcaggctcaaatgcttagacttaccggatattgattttgacctcaacattatgacagttgatgactatttccgtcagttttacaagtaaccaggaaggataagaagaacataaaaaatggcactattctctaaaatattaattttttatgtgattggtgtgaacatatcctttgtcattatctggtttatcagtcatgagaaaacacatattcgtttacttagtgcattcctggtcggaataacctggccaatgagtctgcctgtggcattacttttttctctcttttaagagctgtagttgagtggacccgctggttatcgtgaaacgaagcgtctctcctcaaaactggatttgcggaacgatgaacgaagcagtcgcctgactgcttcgttcattaaagtgaaatttatttctgtgggcgcatcgccgggaagagaataacgtcgcgaatagtatggctgttagtaaacagcataatcattcggtcgataccaatacccagaccagcggttggcggcagaccatattccagcgcagtcacgtaatcttcgtcatagaacatggcttcgtcgtcacctgcagctttagcattaacctgttcctggaaacgttcagcctgatcttctgcgtcgtttaattcgctaaaaccattaccgatttcacgaccaccgatgaagaattcaaaacggtcggtgatttccgggttaacatcattacggcgtgccagcggggacacttctgccggatattccgtaataaaggttggctgaatcagatgtgcttctgccacttcatcaaagatctctgtgacaatacgtcccaacccccagcttttctctaccgtaataccgatagattcagctaatgctttagcagcatcaaaattatccaggtcggccatatcggtttctggacgatattttttgattgcttcgcgcatggtgagtttttcaaacggtttgccgaaatcaaacacatgctcgccataagtgactttagtggtacccagaacctcttgtgccagggtgcggaacagactctctgtcagttcaatcaaatcgtggtaatccgcatacgccatgtagagttccatcattgtgaactcaggattatggcgaacagaaataccttcattacggaagttacggttgatttcgaatacccgttcaaaaccgcctacaaccagacgtttcagatacagctccggcgcgatacgcagatacatatctaaatccagagcattatgatgggtaataaacgggcgagcagatgccccacctggaattacctgcatcatcggggtttctacttccataaagccgcgcgcgaccatgaattgacggatagcggccagaattttactacggacaacaaacgtttgacgggatttatcgttagcgatgaggtccagataacgttgacgataacggacttcctgatcctgcagaccatggaatttatctggtaaaggacgtagtgctttagtcagcaggcgcagctcagtacagtgaatggaaagctcacccgtttgcgtcttaaacagcgtaccgcgggcaccgataatgtcacccagatcccattttttaaactgatcgttataaacaccttctggcaggctatctcttgcaacgtacagttgaatacggccaccgacatcctgcaacgttacaaaggaggctttccccatgatacgacgggtcatcattcggccagcaacgctgacttcaatgtttaaggattccagttcctggttatccttcgcatcaaactcttcgtgcaactggtcagaggtatggtcgcggcgaaaatcattgggaaacgccacaccttgctgacgtagtgccgccagtttttcgcggcgatttctcagttcatcgttaaaatcaatagcctcattggctccccgtgtttcttgttcagacattttggttcctctaaatccagctttcaatttagcgtagataaagagacagatcggtacactgtattatctgcctcgactattagtaactcagtttatcttatcgaaactaacgcttacctcaagttgatatcactaataaataaccatcaaaatggtttaaatgacttattaatctcgatttgttagtgttataaactaaaagttaatttattcataaccaattgtttttacgacagttaatcgttgctctcctgtatcatattcgtcggcgtgctaaacagaaaacgggtagcaaaggccaatacgacgatgatcgcgacacaagccaacgtccactctcccatctgagaaaagaatcgctggtaagctgcaattgccataccgctaatttggctctctgtcgtctgctgtgccacgacgcctgccagccagttggcgaccgcgcctgttgccagcatataaatcccggttaatacgccagacattttcagacgcgtgatttgcgcaatcgccaccgggtcaataaagagttcggcaaagcccattagcgccagcccggatatcatcacgcccatactcgcttgaccgtcagccgctgcatgtcgggcatcaaatgccaacaacataaagccacaagccatcagcagtaagccaaaggcaaacttcagccagacgcgcaatgtactgttgccgcggctttctgggctcgccagccaggccagtacaaccccagcgagcatcaccgcaattgcattcacgctctggaatagtgctgtaggtacttcaatattgaatgcctgacgattcacaaagcgatcgataaacaagctgatggtactgccgccctgttgtgccagtacccagaacaatgtcccgacaaacatcaacaatacaatttgccaaagagcacggcgatgttcggggaatttgatcatcatgcgggcaatgatttgtgcggcaatgaggcaaacgatcgccagcaaatatccggaccagtcgttctccagcagcagagtaaaaaatactggggctaaacagagcatcaccactaaccagctccatactggtaaggcaaatttgacactagtgagcgcttttttatccatactacgtgtggactggaaatgacgatgaccgcttaagaaaatcaacaaaccgataaacatgccgccacccgcaagggcaaagccaacatgccatccataccactgagcagccaggccgcaggcgattggggctgcgatagaaccgatattgcccgcagcatacagcaggctaaaaccgccatcacgtcgatgatcgttctcgtcgtagagctcgccaagcaaacagctgatgttacttttgaataaaccgtagccacaaataatgattgccagcgccagatacaggctaaaggtactatttgtatcaatacccagcaccacatggccaagggtcattaacagcgcgccggcaatcactgcagtgcggttgccgagcaggcggtcggcaagccagccgccgagaataggggtaacgtaaaccagagaagcatatgcgctgaacaggctgatggcatggttatcatcaaaaccaagctgatgggtgagatagagaatgagtaaggcacgcatgccgtaaaaactgaagtactcccagatttggatcgccacgatatagtatatcgcgcgcggctgactgggtgttttcatgtgttctccttatgagcaaaaaagggaagtggcaagccacttcccttgtacgagctaattattttttgctttcttctttcaataccttaacggtatagcggccatcagcctgacggtatgcaccgtgaatatcggtttcaaagcccggatagtgagcgccgatttcacacagcatctgcaggaactccagaaccggacggctttcttcggtgatcatttcacccggcattaccagaggaactcccggcgggtacggaaggatcatattggcgttaatacgacctaccatttcgtcgaggtaaacttcttcggtcataccgtgcagctctttctggaatgcagcatacggagtcattaccatcgtcggcagcacttcaaatgcgcgatacatcagatccggcagattgtggtgaacaatcagtttgtggatattctgagccagttcctgaatacgcatgttttcatagaattcaggatcttcacgatacagagacggcagcatgtttttcacacgcaggttcaggtcgaacgcacgtttaaagtcagtcagagcacgcagcaggctcagtgctttggtcttatcgataccgatgctgaacaggaacagcaggttatacggaccggttttctcaacaacgatgccatgttcgtcgaggtatttcgccacgatgctggccggaataccaaagtcgctcatggtgccgtctttttccatccccggagtcagcagggtgactttgatcgggtcaagatacatgtgctcgttatcgatgtttttgaagccgtgccaggtgctgtcagaacgcagcggccagcattcagtcgtatcgatatgatccggctgccatacatcaaagaaccagccatcagattccgttctcagacgtttgatctctttacggaatttgatcgcacgttcaatagaaccgttgatcagacgcttacctgcattgcctttcatcatcgccgcagcggtttcagtggacgccacgataccgtagtgcggagaagtggtggtgtgcatcatgtaggcttcgttaaaggtttcttcgtttacgtcacctttaacgtggatcatggaagcctgagagaacgccgccagcagtttgtgagtggactgggtttcgtaaatcactttcccttctacacggccaccgctcataccgcatttaccttcgtaaatcggactgaagttggtgtaaggcacccacgcggagtcaaagtggatggatttcacatccagtgttttcttgatgaagtcggtgttgtacagcagaccatcataggtagagttggtaattacagcatgtaccggccaggttgcgtttggtgtttctttcacgcgcttagcaatggtagcgtgctggaattcactctgtgggataccaccaagaataccgtaagcgttacgggtcgggcggaaatagattggcgtaacatcgctcatcatcatcaggtgggtcaggcttttgtggcagttacggtcaatcagaatggtgctgcctgctggagcagagtacataccaacaattttgttcgcagtggaagtaccgttggtcaccatgtagctgcggtctgcgttaaagacgcgagcgatatactgttctgcttctttgtgtggaccactgtgatccagcagagaacccagttcagatacactaatggaaatatcagatttcatggtattcggaccaaagaaatcatagaacaggctacctaccgggcttttctggaatgcagtaccgcccatgtgaccaggagtacagaaagtatatttaccttcacgaacatatttaaacagtgctttagtcagcggaggcagaatagtgttgatatattcgtcagtggtctgcttgatcttattagcaatatcttcagcagcacccagcgcatattcaaagaagctaatctgtaaacgcaggtcattcaggcttacatcgagagtggaatacgtattagcgaacgcgtacaacggcaggttctcgttcattttgctaatttcttcgcacagctcgagattatatttatcccagtcaaaaataacgccgcacagacgcgcattgttttcgatcagttttaataagtcgtcacggtcgttcgggtaaacaatctggaagttcagacgttcaagcgcgcgatgaagttcacggatgggttcttctttaaaataaacccccatgtgattcaatattgcaataacgttcatagtcatatctccaggtaaaaaaggcccctcccaacacatgggacaaaatgaaaggaggagcctcggaaaatacttttaattaatgtgcgttagacgcggtgtggttatccatactgtggctctggcgctcgtgcattttgcgagcgtagaacatcaggataatcaggctgacgatgaaggtacctgccagctcgaaggagcttgcgcccatcagcgcgatgaagcagaacacgcaacccagtacagagcagatcaggctgacaaagttgcggatgttaacgccttcaaaacgaatcaggtcaacgcaagagtagaaatacggcagcatagtcagcagtactgcgataccggtcagttcaccgaacaggtcagatgctttaccaccggcagagttcatcagagtgataaggatcatcagggcagtcattttcactgcagccagcagcagaccttttttcggaataccgttgctgtcgacttcaccataaactttcgggaagttaccgtcgttagcggcacgtacacctgcctggcctaccaacatcatccaggagcccagagaagtcaggcacgcaaaggcggtgaatgcagaaaccagcggcgcagcccagttaccgaggatagtactagcactgattgcaaacggagcaccggaagccgccattacagaagacggatacataccggaaagcacctgagtcgcagcgatgtaaacaatacctgctaaaccagtacccagcatggttgccagcggaacggtacgtttcgggtttttaaccataccagtacttacagctgcggattcaacacccacgaaggcccacaggcagagcagaatacttttaatgatcgcatgaccatcagtggtatccgcagtattccagttagctgcataagttgccgcatcaaaccaatgccagccaacaatagcagtcatcaccacaggaataagaaccagcaccagaccaatagtggttaaacggcttacccaagtaccgccgagcatatttacaaaggtaaatacccagacgatagcaatacaggcgatacccgccggaacaggatcatttaatactgggaagaaggtggaaagataagatacagcggtaataccaatcgccaggttaccaatccagttagcatggtaataaagaacacctgtctgaaaaccaaatgcaggggaaatttctccggcataagcaattgggccaccttgttgcgggttttttgttgccagtcgggcatatacatacgccaggctcattgcaccaataatagagataatccaaccccagatagcaataccaccgatacttgctaggttcgcaggtaataatgcaataccgctccccatcatattaccggcaacaacaccggtacaggcaaatagcccgatcttcttggcagaactcatgctcttctcctaatttcatttttgaatttggagtccgggtcatgatgtataactatttcctgaccagaccaaactggcgataagattactcacgaaaaaaggattaatcctaaagattaggtgaaataacacaaaagtttctgtaagtgagaacttgaggttttttattaacacatcaggatcgcaagttgatatcatgaaaagataaacatttaatgtttacaatggattgcgtgacattctctggttaaatttatgtaataaaaattatgcggcaaataaattgccgcaacatattataccaacaggaacatacaaaaactcaacaacaaatatttccgagcataaatcaacccggagttacttattcactagcaagaaatttgtcgagataaggtacaacataaggaacagaagtctggaatataccattttcaatccagtaaagggtgtttgcccctgggcgtaaattaaaggcggtgagatatgcatcagctgcttcccggttcatccccttcatttcataaaccttgccaagcaacacataatttagccaggacatttcaagatcaatgccagtatttatcgcctggtaagactcatctgttttaccttttaccagagcactgaccgcttttatttgatatataatggacaggttgttcaattccggcagtgtaacaatgttatctatttctgtgttcagtgctgctaattgtttttcatctaaaggatgttgagaatggcgcacgatatcaactaatgctttttctgctctcgcgtaggtaaattctggggaactttgaacaatctcacctaataattcactggcacggttcaaacttttatcatcgccatgcagtaaataatcatgtgcctgataaaaattagttaataacgcaccacgatgcggcaaaattttctggagcgtctcctgcattcgttgtggccacggttggtttaacgctttacttaaactctccagtaaatcattttgaatcgccagctgattaccgttagtgatgacataacgtttatccagcatggtactaccatctgcattgtctaccaattttatgctcataaagcattgttgagcacggtattggcgctgattaacaaacgcaatagataatgttttaccggaactgctcggttcatcaatgttgtagttgattttgtcatgcaccataaaggtggagaaggtgttaagacttgtcgccaccaaatcacccacgcctatcgcgtaagagagctgatacggggaactccagctgttacaacttttatttaccatattaatgtcaatatcgcgtggattgagcaaaatacggcttttgctcataggaagacgtgtatcaagactactaaacgctaccagtgctacacagatacctaagctcaacaggaaaaaaaaccatacccaaaaggtagtgaatcgtttgcttttaactggggattgttcaggtggcgttgcggtgttttgaatgttaagactgtgggagggagaatctgtggcaggaaccgcctctggtatagggggagggctagatagcattatttcctctccctcttcttcgctgtaccagataaccggcaccattaatttatagccgcgctttggtacagtagcgatatagacaggactatcttcatcattatcttttaaactcttacgtagttcactgatactctgcgtcacaacgtgattggtgacaatacttctcttccagacattatcgataagttcatccctgctaagtacttcgccactgtgttgagcaaagaaaaccagaagatcgattaatctcggctcaagggtaagttgacgcccattgcggctaatttggtttatggacggagtaacaagccattcgccaacgcgaactacaggttgttgcataatagaaactcattcgaaaagggaatgatgcaatgataattgccacaacctatttttaccatctatagatgggtttatttacatattattggtgaatgcaagacgttatttttaccagccataaacttcttgattacatagtattacgaaaggattttactgagaaccagaagtaatattccttaccatcaaaattcatcatctttgccaaagaaaaatgttcagaaaataatccatggaaaattgtccggagcacttactattttaatggattgttagtctttgcatgagcaagcgaactgatacatttctctttgttctcattcagaaaatctcatcagtcgccgttcagaccggtgttgtgctttatggatgcgttacgctcctgatgacgtcatttgacgttcaacagcatcacggggccgcacgacatttcacgtcagttagtgctatagctcaggaacaaattttcccgaattgggatatgcccgcaaattgctggtgatgtggggagaatctggttgagttcggtagaattgatttggaggcagaacgcttaaatcgtggcgtcctgaaacgaaaaacggacctccgtggaggtccgtttatatgaatttggtgcccggactcggaatcgaaccaaggacacggggattttcaatcccctgctctaccgactgagctatccgggcaacggggcgcattaaaccgtaatctgcacatctcgtcaacctaatttcagtaaaagcgattcaactgcttaagattgcggcaaatcgcttcttttctgtgtttctgtcaggtcaatgcaccaccctggcggcagcgggcgaagcgcaggatatcttccgccagccgatgtgcagtgtcgacatccgcctggctacgattcaccagcattcggcttaaacagccttccagcaccagttccatctgctttgctaccatcgccggatcgtcaacttccagtgtggttaacagttcgtgggtgaaatcgtaggccgcgcttttttgctgatcggccagttgatgaatagggtggccaggatcgggataaaacgtacaggcagcgataaatagacagcccggatagcggttgtttttaacgcactcgcttaacgcctgataacgtgccagcagcttttgttcggcggtttgcgtttcgtccagcatcagctgacgacgccagacatctatctgttggctaagataacgcagcgcatcgtagaggattgcctctttgtctggccagaagcggcgtagctcgtccagtggataatccacacgttcagcaaccatctccagcgtggtgttggcaatcccttgtaattctaataatttcagggcttctcccagtacatcttcacgttgcacgctattttcctccgtctttcccactgcaagtgtcgttcacggttggcgatcgcgcaaatgtgcgctgaaggtttcagcatccataaagcccgtgacgcgtgcttgtggatgctcctggccttgtccgtcaaaaaagagaattgtcggtaggccaaggacattaagatgctttaacagcgccacatcttgtgcgtcgttggccgtgacgttggcctgaagtaagaccgtgtctgctaacgctttttgcacctgcgggtcgctgaaggtgtatttctcaaactctttacaggcgacgcaccagtcggcataaagatctaacatcaccggtttgcctttggcttcaacgagcgcctgatttaactcatctaccgttttgatttgtgtaaagttgagatgcgtctgagtttgcgcggtatgcgtcgcaccaaatgcccaatcctgaagtgggcgcacgctaaccaatgccgctgccagcagaataatttgcacaatacgcatccagccgcgtttagcctgtaggctggtgataaaggcccagccaaagaatgcgacacccagcgcgctccacaagcgtaatccccatacatcaccaatcactcgctccagcaggaagaccggcagtgcgaggatcacaaaaccaaacgcggttttgacttgttccatccacgggccgcttttcggcagcaagcggttaccaaagacggtaattagcatcagcggcaggcccatgcccaacgcatagagataaagcgtgccgccgcccagccacatgttcccgctttgggcgatatacagcagaatcgcgctaagcggtgcggtggtgcatggactacagatcagtccggcaatcgcccccataacaaacacaccgccaggactgccgccctgttggcgattgctcatcaacgtgagacgtgtttgcaggctagaggggagttgcagggtaaacaagccaaacatactcatcgccagcaaggtaaagacgatggcgaggccaatgagcacgtatgggtgctgtagcgccgcctggaactgtaaccctgcggcggcaaccaccagacccagcgccgtgtaggtcagcgccatcccctgcacataaataaaggtcagcaacaatgctctggcagtggagagccgctgtttaccacccagcacgatgccagaaatcagtgggtacattggcagcacgcatggcgtaaaggcgataccaataccgatcaacaacgcccagagcgcggaaaagggcaattgcgcggtgggctgctcttgctgcggaacagacacaggctgtggcgctgcgttgttggcgaccacttcgcttaacggaacggttttggtttctggcggataacagaaaccggcatcagcacagccctggtaggtgacagttaacgtcgctcccgcactcgcctggttgatggtgacgggaagcgtcagccgatcgcggtaaatctcgcttttgccgtaaaactcatcttcatgccagacgccttgcggcagctgcacgtcggcaattttcgcgtgttccggcgtaatgcggatctgtttacggtagaggtagtaaccgtctttgatctgccaggtcagattaaggtcatgttggttttgctgaaaatcaaaagcaaaggcttgatccgcggggacaaattgactacgtcccggcgcgtcgaataatccggcaaaaacggaagtgctgcaaagtagcaggatcagcgtaaagatgcgttgagccatgagaggtaatctgtgtctccttatgtcagcgtaaagatgcgttgagccaactgaggtaatctgtgtctccgtgtgtaacaggtaaaaccagaagttccggggtttgatatggatgatgagacttcaggcattccagcagtgcctgctggtgagatacggtagtttttaaaatcatctgcacttcgtattcttgctccagcttaccttcccagtaatagagagaggtagcgccggggatcaaggtcgcgcaggccgccagtttttccgccagcactttggcggctaaatcctgggctgtcgcttcatctggtgccgtacatagcaccacgacagacgcggtattgctacttttttcatcaagcataaacacctcgcaagaacagatggaaccgcaagagagaggtcactatacaacggacgggggaaggatgttagtcggcgggaaagaaagcggggcgtgaacgccccgcgattgatcattacagcatgaagctacccagcacgaagccgaagcaaacggccagggcaacacccagagtacccgggatgaagaacggatggttgaagacgaatttaccgatacgggtagtacccgtgtcatccatctgtaccgcagcaaccagcgtcgggtaggtcggcagaatgaacagaccagacaccgcagcgaaagaagcaacagcggtcagcggactaacgttcagtgccagagccatcggcatcagtgcttttgcggttgcagcctgagagtacagcagagcagaagcaaagaagaagatgacggccagcagccacggatgaccctgaatcacttcaccagcggtatctttgatccagtcgatgttgttggaaacgaaagtatcgcccagccacgcaacacccaggatacaaatacaggcgctcatacctgctttgaaggtgctggagttgaggatgttgtcggtatcgactttacagataacggtggtcagagttgcaacgctgagcatgatgatcaggattgcgttggtggtgttcatcagcggtttttcaaccagacccatgcttgggctgttgatgattgcatagataaccacgccaactacgcccagcaggaacagccagacggacgtttttgcaccggatttgatttcaatctgcttttcaccgcgcagttcaaccaggccctcttccagacgcttgcgataaatcggatcgtcagagagtttggagttgaacagcatagtgaccaggaaggacatcaccagaaccgccagcagggtggacgggatgaccacggagagcagatggaggtagctgatgccatgaccttccatcacggaagacatgtaaaccactgccgcactgattgggcttgcggtgatcgcaatctgcgcggataccactgcagtagacagcggacggcaaggtttaacgccttgttccttcgcaacttcagcgataactggcagtgtcgccagagagatgttgccagtaccagcaaagatagtcaggaaataggtcacgatcggtgcgaggatcgtgatgtatttcgggttacggcgcagcagcttttctgtctgatgaaccagatagtccagaccgccagcaacctgcatggcagaaatagcggcgataaccgccatgataatggagatgacatcgaacgggatgttaccgggtttaacgccaatagcggcaagaaccagcacccccaatccgcctgcaaaaccaatacctattccccccaatctggcgcccaagaagatcgccagcaaaactatgatgagttctacaactagcatattagccttccttgttttttaacaagttgatattagattgttatttttaagttactgctcacaagaaaaaaggcacgtcatctgacgtgccttttttatttgtactaccctgtacgattactgttcgctttcatcagtatagcgttttgctttgtaagccgggtgcatcagattctgtacggagaaaatatcgtcaagttccgcttcagtcaacagaccgcgttccagaacgacttcacgtacactcttaccggtttcggcacagattttacccacgatgtcaccgttgtggtgaccgatgaacgggttcaggtaagtaacgataccgatagagttgtaaacgtaaccttcgcacacttctttgttagcagtgatgccgttaatgcatttttccagcaggttgtagcaagcgttggtcagaatgtgaacggattcgaacatggcctggccaatgaccggctccataacgttcaactgcagctgacctgcttctgctgccatggtaacagtggtgtcgttaccgatgactttgaagcatacctggttaaccacttccggaacaaccgggtttactttagctggcatgatggaagagcccgcctgcagttccggcaggttgatctcgttcaggccggcacgtgggccactagagagcaagcgcaggtcgttacagattttggacatcttcacagccaggcgtttcagcgcgccgtgaaccataacataagcgccgcagtcagaggtcgcttcgatcaggtcttcagccggtacgcatgggaagccagtaacttcagccagttttttcactgccagcggagagtactctttcggcgtgttcagaccagtaccgattgctgttgcaccaaggttaacttccagcagcagttcagcggtacgttggatgtttttcacttcttctttcagcaggatgctgaaagcgcggaattcctgaccgagggtcatcggtactgcgtcctgcagctgggtacgacccattttcaggatgtcctggaattcgacagctttacgttcaaagccttcacgcagttggttaatcgcatctaccagcttaatcagggaagagtaaactgcgatacggaaaccggtcgggtaggcgtcgttagtggactgacatttgttaacatggtcgttcgggttcaggtactgatattcacctttttggtgacccatcagttccagaccgatattggccagcacttcgttggtgttcatgtttacggaagtacctgcgccgccctggtagacgtctaccgggaactgatccatgcattttccgttgttcaggacttcatcacatgcggcaatgatggcattcgctacacttttaggaatggtttgcagctctttgtttgccatagctgcggcttttttaaccattaccataccgcgaacaaattcaggaatatcactgattttgttgttgctgatatagaagttttcaatcgctctcagagtgtgaacaccatagtaggcatcagctggaacttccctggtacccaacagatcttcttcgatacgaatgttgttactcatgtgaaccttctttttcaagctgccaatgatttgctttaaacacacagaatatatgtggtttcgaatgtttttcgaccgacgattatcccctgcatcgaccgaatacccgagatcatatgctgcttgaggatttctaccgtaatctggatcactttaagtgtcggtttttaccccttaattattaatttgtgaaatagatcaccgctttgggattactaccaaaaatagttgcgcaaacatcttgaaattttgctaatgaccacaatataagctaaacgcgattcgcaacccattcaggtagccggggttaaccggctgctattacaggagaaacctttgcgctggttaccttttattgccattttcctttatgtctatattgagattagtatctttattcaggttgcccatgtattgggggtattgctgaccctcgtgctggttatattcacgagtgttatcggtatgagtctggtacgtaaccagggctttaagaatttcgtgctgatgcagcaaaaaatggcggcgggtgaaaacccagcggcggagatgattaaaagtgttagcctgatcattgctggtttgctgcttttattaccgggcttttttaccgacttcctcggtcttctacttttattgccgccggtgcaaaagcatctgacagtgaagttgatgccgcatttgcgcttttctcgcatgcctggcggcggttttagcgccgggaccggtggcggtaatacttttgatggtgagtaccagcgaaaggatgatgagcgcgaccgccttgatcataaagacgatcgccaggattaatgtcgaaacgccggattatgtggttatgccattttccggcgtttttcgttttggcagcaacagccataaccccgccagcatgatcagcgcatagagacttttccagccgaccattgccagtaacagaacgcataacagcccgccaaccaccgccagtagtcgataacgtccttgcaataatttacagcctgccagcatgcataacagataaatcataataaagatgccattggcataaataataagagcgtccagattgatctctaaagcatgaatcaccaaagtgctcaccacacagcagccgagcaccgcattgagggcattattcgggatatggcgagaagagaggcgtgccaggtagtggtcaggattatgttgcgcctggctccagaccaggcgggcgaagctctgtatataaatgttgagactggcaaagcaggccagatagccaatcacgcaggcaatccataacgctcctacaccgaacaactgcactacaatttttggaaggcttgctgccgccgccattttttcaccataggcgtcgaagtgtaagacgactaccgtacagccccagtagactaatcctgccagcagcagaccaatcatcaaagcacgaggaaaatcacgctctggatttttaaattcgctggcgagatgggcaaatgcctccagaccgacaaaacaccagaacatcacacttaacgcagcaaataacccggtaagttcgatattaccaggtgccggaaaggggatattcgcaggtttgatatcgcccgcccaccagatagcgacaatcagcgcgacgataagtccggcaataacggtttgtagattagcactggaactggcaccgcgagtaccgatataccacaccagcgccagcgtaccgagttctgccaacaacagttgccagctatgccagccaaacatcgcctggccgaacccggcggcaatttgtagtgcggcaggcaaacccacgggaatgacgcttaaaaacagccagccggtgactcgctcaagccggctaccaaacgccataccgacgaagtgcgcgacgccgcctgcgctgggatagtggcgacccagaatcgcaaacacaatcgcaatcgggaacactaagataatcaaaacgggccacgcccacaggctgttattgcccgctaccagcgcagctaacgcaggaacggcaaacacgccagtgcctaataaactcgtgcttagcaggccaatgccctgggccagccccagttcttgtttgagtccactcatgggttgatgtccgattgcgcccaaattttgggcaactgcgtagattttcgatggtagcacaatcagattcgcttatgacggcgatgaagaaattgcgatgaaatgtgaggtgaatcagggttttcacccgattttgtgctgatcagaattttttttctttttcccccttgaaggggcgaagcctcatccccatttctctggtcaccagccgggaaaccacgtaagctccggcgtcacccataacagatacggactttctcaaaggagagttatcaatgaatattcgtccattgcatgatcgcgtgatcgtcaagcgtaaagaagttgaaactaaatctgctggcggcatcgttctgaccggctctgcagcggctaaatccacccgcggcgaagtgctggctgtcggcaatggccgtatccttgaaaatggcgaagtgaagccgctggatgtgaaagttggcgacatcgttattttcaacgatggctacggtgtgaaatctgagaagatcgacaatgaagaagtgttgatcatgtccgaaagcgacattctggcaattgttgaagcgtaatccgcgcacgacactgaacatacgaatttaaggaataaagataatggcagctaaagacgtaaaattcggtaacgacgctcgtgtgaaaatgctgcgcggcgtaaacgtactggcagatgcagtgaaagttaccctcggtccaaaaggccgtaacgtagttctggataaatctttcggtgcaccgaccatcaccaaagatggtgtttccgttgctcgtgaaatcgaactggaagacaagttcgaaaatatgggtgcgcagatggtgaaagaagttgcctctaaagcaaacgacgctgcaggcgacggtaccaccactgcaaccgtactggctcaggctatcatcactgaaggtctgaaagctgttgctgcgggcatgaacccgatggacctgaaacgtggtatcgacaaagcggttaccgctgcagttgaagaactgaaagcgctgtccgtaccatgctctgactctaaagcgattgctcaggttggtaccatctccgctaactccgacgaaaccgtaggtaaactgatcgctgaagcgatggacaaagtcggtaaagaaggcgttatcaccgttgaagacggtaccggtctgcaggacgaactggacgtggttgaaggtatgcagttcgaccgtggctacctgtctccttacttcatcaacaagccggaaactggcgcagtagaactggaaagcccgttcatcctgctggctgacaagaaaatctccaacatccgcgaaatgctgccggttctggaagctgttgccaaagcaggcaaaccgctgctgatcatcgctgaagatgtagaaggcgaagcgctggcaactctggttgttaacaccatgcgtggcatcgtgaaagtcgctgcggttaaagcaccgggcttcggcgatcgtcgtaaagctatgctgcaggatatcgcaaccctgactggcggtaccgtgatctctgaagagatcggtatggagctggaaaaagcaaccctggaagacctgggtcaggctaaacgtgttgtgatcaacaaagacaccaccactatcatcgatggcgtgggtgaagaagctgcaatccagggccgtgttgctcagatccgtcagcagattgaagaagcaacttctgactacgaccgtgaaaaactgcaggaacgcgtagcgaaactggcaggcggcgttgcagttatcaaagtgggtgctgctaccgaagttgaaatgaaagagaaaaaagcacgcgttgaagatgccctgcacgcgacccgtgctgcggtagaagaaggcgtggttgctggtggtggtgttgcgctgatccgcgtagcgtctaaactggctgacctgcgtggtcagaacgaagaccagaacgtgggtatcaaagttgcactgcgtgcaatggaagctccgctgcgtcagatcgtattgaactgcggcgaagaaccgtctgttgttgctaacaccgttaaaggcggcgacggcaactacggttacaacgcagcaaccgaagaatacggcaacatgatcgacatgggtatcctggatccaaccaaagtaactcgttctgctctgcagtacgcagcttctgtggctggcctgatgatcaccaccgaatgcatggttaccgacctgccgaaaaacgatgcagctgacttaggcgctgctggcggtatgggcggcatgggtggcatgggcggcatgatgtaattgccctgcacctcgcagaaataaacaaacccccgggcagaaatgtctgggggtttttcttttggtcatctttctagtataagattcagacacggacgacgcgagtggcgtccagctcattgattatggggaataacatgcacgtaaaatacttagcagggattgtcggtgccgcgctactgatggcgggttgtagctccagcaacgaattgagtgctgccggtcagagtgtacgcattgtggacgagcagccaggcgcagagtgccagctgattggtactgcgacaggtaagcaaagcaactggctttccgggcaacacggagaagaaggcggttctatgcgcggcgcagcaaacgatctgcgcaaccaggcggctgcaatgggcggtaacgtgatttatggcatcagtagcccgagccagggaatgttgtccagttttgtcccgacggatagccagattatcggtcaggtttataagtgcccgaactgatgtgatccagaggctgggtgacaaacgtataattgcctgatgcgcttcgcttatcaggcctacataaggcattgcaactgattgaatgcttgagaatttgtaggccggataaggcgtttacgccgcatccggcatgaccaacgatcacgttatcagtcatttcaggctggatggctccagcctcgcattagcaaagatgagattatttcgcctgtggtgcagttttgctggtggattgaacacgtaagtgatgcagcgcgcgtaagcattgatcctgggttagcggttgggcgttattcgccgctacggtgcgaacatagacctgacatggcacacccgcgagttttttcagtcgtgggctgaaatcaagcattcggcgagtgatcgcttctatttctttacccggcgttgcttcacgcgttttcaccactgcgccgctaaattgttctttgccactttcatctttaaagcggtaaagcaccgccagataatggtcgaacaagttatgtttccattccggttgggaataggtgtcatattccagattgccattgtcctggcagtcaacgtcgtataacggcaggaaatctaacagactggtaatacgtaatgccagttcacgcatttccgcattattaattgcatgaatgattgctcgcgccagcatttcaatctgcaactcattgacgactaactcacatttgctaccgtcatgtagcgttaatacgaaggtaagattttcgccttgattatcggtaagttccagcgtgttaacccgacgattaatatcggcatttttaagctcatcaaccagaatttctgggatgttttctgccattttcttaatgactttatcgcgagcttgctcatactgaaggtgtgcagcagcatccagtttatgcttttgatgcagacgactttccagcgcaatcagcaggtcgcgcagttccatgacagacataaagaacaagctttctttattgcgaggttctttaattttcagcgccagtgcaatgaaattattactcttgcgaataacaccggtattaacacccttgatgcttatggccatgtaggttctccctaaccatttctcaattaaataattaattttaatttataagccagataaatgggcttggtagtaatagttgttaaaataacataaatagccgtactcactctatataaacagaaaagaaaggttaattattggtgttagctatataaaaagtaacaacagcaatgcatatgaataattaaaggttatgcaacgggcaaagattaaacttcccagtttaatgacaggttgctgtacttgcgtttgttgctcttgccggatgcagcgtaaacgccttatccggcctacagttcattgcaaatccattcaatttcaatgcacgatgtaggcctgataagcgtagcgaatcaggcaattttaatgtttaacttccctgtttaatcagttactgctggcgtagctggagatccagcggcgttttgctgggttcgccgccaatttctcgcgccagtttcggcaccagatatccgctcaccagtgtcagcaactcacgcataatctgccgtgcttcgtcatcactcaccataaaatgcgccgcgccctgtactttatcgagcacatgcaggtaatacggcattacgccggcatcgaacaacgcattactcaggtttgccagcgtttgtgcgttatcgttcacatcacgtaacagaacgctctggttcagcaaagtaacgcctacccggcgcaacttagccatcgcctgacggaatgtttcatctacctcattggcatggttgatgtgattcaccagcaagatttgcagcgtagaacgggcaaagcattcaaccagcgcctcggtgatacgtgccgggatcacaatcggcagacggctgtgaatccgcagacgttttatatgcgggatggcttccagttgtgtgagcaaccagtccagctcgtgatctttcgccatcagcggatcgccgccggagaaaatcatctcgtccagttccggatgcgcagcaacatactcaagtgcagtttgccagttacgcttgttgccctgattttcggcataggggaagtgacgacggaagcaatagcggcaatttaccgcgcagccgcctttgaccagcaaaagcgcccggttgtggtatttatgcaacaaaccaggcactacgctgtgctgttcttccagtgggtcggtggagaatccgggcgcgatgacaaactcatcttggctggtaagtacctgacgcaaaagaggatcgtccggattgcctttctccatgcgatcgataaaactgcggggcacacgcagggcaaaaagctttttggcgctgcgtccggctaacagtttttcctccgcgtctatattcaaaagacgcagaagttcatcaggatcggtcacaacatcggcaagttgcgttaaccaatcttctctggatggggtatttagggttacaatatgcgccattttgtggcttagctaccaattaacaaatttcagagggccttatggcaacgtactatagcaacgattttcgtgctggtcttaaaatcatgttagacggcgaaccttacgcggttgaagcgagtgaattcgtaaaaccgggtaaaggccaggcatttgctcgcgttaaactgcgtcgtctgctgaccggtactcgcgtagaaaaaaccttcaaatctactgattccgctgaaggcgctgatgttgtcgatatgaacctgacttacctgtacaacgacggtgagttctggcacttcatgaacaacgaaactttcgagcagctgtctgctgatgcaaaagcaattggtgacaacgctaaatggctgctggatcaggcagagtgtatcgtaactctgtggaatggtcagccgatctccgttactccgccgaacttcgttgaactggaaatcgttgataccgatccgggcctgaaaggtgataccgcaggtactggtggcaaaccggctaccctgtctactggcgctgtggttaaagttccgctgtttgtacaaatcggcgaagtcatcaaagtggatacccgctctggtgaatacgtctctcgcgtgaagtaatgcggttgtggtgcggcctgcaggctgcaccatcacttattcaggtcagagatgatgaaacgccttatcgttcttgttttgcttgccagcacgctgctcacgggctgtaacaccgctcgcggtttcggcgaagacatcaaacatctcggcaactccatctctcgcgctgccagctaatttttcttctcttccgaaaaatcatcagattcccatcatttttggcgatgttgtctattattaatttgctataggcaaacataaataacattacctaaaaggaagacgttatggtgaagaagacaattgcagcgatcttttctgttctggtgcttagtacagtattaactgcctgcaacaccacgcgtggcgttggtgaagacatttctgatggcggtaacgcgatttctggcgcagcaacgaaagcgcagcaataagcaataacggtacgacagctgtgtcgtgccgtttgttttttctgcgatagtcacaaaggtaatagttgaaattcccctgccacctggcaaaatatccgttcaaccatcagctttgcaggacgacctgcaaacgcctcttttcaccggggacggccccaattctccggagcctgatatgtcctggattatcttagttattgctggtctgctggaagtggtatgggccgttggcctgaaatatacccacggctttagtcgtttgacgccgagtgttattactgtgacggcgatgattgtcagtatggcgctacttgcctgggcgatgaaaagcttaccagtagggacggcttatgccgtgtggacgggtattggcgcagtcggcgcggccataaccggcattgtgctgctcggtgagtccgctaacccgatgcgcctggcgagtctggcgttaatcgtattggggattattggtctgaaactcagcactcattaactaccaggctgctgtacccaaataaatttactgacatcaaacccttcccgggtcgcgactgccagcatctcctgtttcacttcgtcagaaatggttggcgtgcgggagagtatccacaggtagtcgcggtccgggccgcaaaccagcgcatggcggtattcccgatcgagtgcaataacgttataaccgccatagaaaggaccaaagaaactcactttcagcgcagcgcgagttggtgcgccggtaaagtacgctttcccttcactctgctgccacattcctctgtcagggttatagcctttattaatgacattcaggccgccgtcatcacgcaggctgtatgttgcggtgactttttccagtccacgttcaaagcggtgatcaaaacgggcaatctcataccaggtaccgagataacgtttggcgtcgaaattatttactacggtcacgccacgcggcggcgtaggagaactgcaggcaacgaccagaaatgcagctgtcgctgcggcaacgagagggagcaggcgcataaatgtttccttactggtttttttctaagtgtagatgacagcaaggaaaagcggagaaaaggtccgaaaattcggacccgatggaattttactgtagagcgttaagaatctgccaggcggcgtcgactctcgctggattgggatagtttttgtttgccagcatcacgatacccagctctttttctggaataaacgcgacatagctaccaaatccgccggtcgcccctgttttatgtacccaacttgcgcgtactgcaggagttgggggcgtaatcgcttttacggggcgtgctgccagtgcaattttattgtcactgccgttaatgatgctgtcaggatttaccggccagtccagcatttcccagcccaggccctgatacatatcgccggtttgccagtagcgagattgtgccagttgtatcccttgttgaagcgttttctcattgatatcaaggggttttaaattgctttgcacccagcgggccatatcttcaatggtgctcttcacaccataagcttcagcatctaacgccccagggctaacatgcactgccttaccttcgcgatatccccaggcgtaattcttttcttctgcgggcggtacattaatccacgtatggttgagtttgagtggctggaagacacgagtttgcatcgcctgctcaaaactcaaaccagacggcttcacagccagtgcgccgaacaaaccgatactggagttggcatacagacgttgtgttcctggagcccatgcaggctgccagttttgatagaagcgcagcaagtcgctactggatttcacctcatccggcacctgcaatggcaggccgccagcagtgtaggttgcgagatgtaatagtgtgatcccattccactgtttagcggtaagttcaggccagtattttgttgtgggatcgcttaacttgatttcccctcgagcaatagcgtcgccaccaagcacgccagtaaatgttttgctgacgctacctaactcaaacaacgtttgctgtgtgacgggctgctttttggcgatgtccgcatagccccaggtaaagtaataaggtttaccctgataaattaccgccaccgccatacccgggatcttttgttgctctataagcggggtaattgtgcgatgcacaatatcgttgatttgttgaggggcagcaaatgtggagcaagaggcggtaattaataaggcgcagagcgtcgttttgaacatagggtctggtttccatacaaaacggcccgccataggcgggccggatttacattggcgatgcgttagattgtaacgacaccaatcagcgtgacaactgtcaggatagcagccagaccgtagaaaacccatttgcccgcaggtacgtggattttcagatcgtgcatcgcgtggtgcatacggtgtaaaccacaccacagcggcagaacgatcatcaggaacaggaatacgcgaccaatgaagctctgcgcgaacgccagaacgcgctcgtagctcagcgcatcacccggaaacaaccccagtggcagcagaatacccaccagcaggatcatcaccggcgcaatgatggcgctccacataccaccggccccgaagaggccccagaataccggttcgtcagaacgctttggatttggattaatcatctcaggctccttaccagtacagggcaacaaacaggattacgatggtggcaaccacagttaccgcccagagacttttgataattggctctggtcccattttttcgtcttttacaatgatattggccgctttcggtgccagttcaaaccaggttttggtgtgcagcagagctgccgccagagtgatcaggttaatgatcacgataaccgggttttgtaaaaagtcgacgaatcccgcccaggcttccgggccatttttcagggcaaacagcccgaaaatcagttcaatgctgaaccacacagccggaaccgccgtgccttcgcgcagcatgtaaaagcgataaaacggcaattttttccaccaggtggacgtcattggccgtacatacggtttacgtttagtcgtcatgttgcactccttagcgtggtttcagggtcgcgataagaaagtctttgctactttctactttgccctgctgaatggccgcagccggatcgacgtgtttcgggcagacttcggagcagtagcccacgaaagtacagctccatacgccgttctggctgttcaactgcgccatacgctccttcttaccgtggtcgcggctatcttcgttataacgatgcgccagcgtaatggcagccggaccgatgaactctgggttcaggccaaactgcgggcacgcggcgtagcacaaaccacagttgatgcaaccggagaactggtgatacttcgccatctgcgccggggtctggatgttagtaccctgatccgcggtgcgggagttgccgatgatgtacggtttgatcgcttccagactttcgatgaagtgggtcatatcgaccaccagatcgcgttcaatcgggaagttagctaacgcttcaaccttcataccgtcggtgtaatcacgcaggaaggttttacatgccagttttggcacgttgttaaccatcatgccgcaggaaccacaaatcgccatacggcaggaccagcggtagctcaggtccggtgccaggttgtctttgatgtagcccagcgcatccagtaaactggtagttgcgtcataaggcacttcatagaatgcgctatgcggtgcggtatcgacttccgggttatagcgcaccacctcaattttcaggtttttcatctcagccattcgccttctccttcttattggctgcttccgccttatcggctgcatccgcttcgccaccgtaaacgcgtttagctggcggcagcgtagtaatcttcacgtcgctgtactccaggcgagtcgtgccatcagcatcgcggaaggcgagggtgtgtttgaggaagttgacgtcgtcacgctcggtgcaaccttcgtccagacgctggtgcgcgccgcgggactctttacgtgccattgcggagtgcgccatacattcagcaacgttcagaccgtggcccagttcaatggtgtagagcaggtcggtgttgaacacgctggaagtgtcggtgatgcgcacgcgcttgaagcgttcctgcagctctgccagcttgtcgatggttttctgcatcagttccggcgtacggtagataccgcagccttcttccatagccaggcccatttcgtcgcggatcttcgcccagttttcgccgccatcctggttaaccagatctttcagacgttgttcaacgccagctgcctgcgcttcaattgccgcttcgttgccattaccggcagttgctgcacgctctgtcgcttgttcaccggccagacggccgaagaccaccagttccgccagggagttagaacccagacggtttgcaccgtgcagaccaacagaggaacattcacccacggcgaacagacctttaatgcgggtttcacagttctgatcggtttcgataccgcccatggtgtagtgtgcggtcggacgtaccggaatcggttctttaaccggatcgacgccaacgtacgctttcgccagttcgcagatgaacggcagacgttcatgcagttttttctcgccgaggtgacgcaagtcgagataaaccacatcgccacgcggcgtggagatggtgttgcctttacgccattcgtgccagaaggcctgagagactttgtcgcgtggacccagttccatatatttgtttttcggctcgcccagcggagtttccgggcccatgccgtaatcttgcagataacggtagccatttttgttgaccagaataccgccttcaccgcggcaaccttcggtcatcaggataccggaacctggcagaccggttgggtgatactgaacgaattccatgtcacgcagcggaacgccgtggcttagcgccatacccataccgtcaccggtaacgatgccgccgttggtgttgtaacgataaacgcgacccgcaccgccagtagccataacgaccgcgttagcacggatctgcaccagcgtgccttccatcatgttcattgctaccaggccgcgaacatgaccatcatcaaccagaatatccagcacgaaatgttcgtcaaaacgctggatctgcgggaattgcagagaggtctggaacagcgtgtgcagcatatggaagccggtcttatcggcggcgaaccaggtgcgctcgattttcatgccgccgaagcgacgtacgttgacgctaccatccgggcgacggctccatgggcatccccacagttccagttgggtcatttcggttgggcagtggtggacgaaataatccacgacatcctgctcacacaaccagtcgccacccgctactgtatcgtgaaagtgatattcgaagctgtcatgatcctgcgcgacagcggcggagcccccttctgcagcaacggtatggctacgcatcgggtatactttactgattagtgcgatttttgcattcggatttgcctgcgcggcagcaattgcagcacgtaatcccgcgccaccggcgcctacaatggcaagatcggcttgaaaggtttgcacgacattcctccagattgtttttatcccacagccacgtacttcagggtaagtacctgaaagttacggtctgcgaacgctattccactgctcctttataggtacaacagtatagtctgatggataagtctgaaatttgacgagatcgatttttttagtgcgcaagagggctaaattatcactgaagatgattaatttaattactaaaccatcagatcgtgctttttttagtcactgcccaccgctgtttgattcctgcgtaaaatttgtctcgccgtcgcgttgcgagtagacttcgtgcccttgtcaaaaactggagatttaactatgagcgaaacggcatcctggcagccgagcgcatccattcctaacttattaaaacgcgcggcgattatggcggagatccgtcgtttctttgccgatcgtggagtgctggaggtggagacgccttgtatgagccaggcgacggtaaccgatattcatttggtcccgtttgagacacgtttcgttggccccgggcatagccaggggatgaatctctggttaatgaccagcccggaataccatatgaaacgcctgctggttgccggttgtgggccggtattccagctgtgccgcagcttccgtaatgaagagatggggcgttatcacaaccctgagttcactatgctggagtggtatcgaccgcactatgatatgtaccggttgatgaacgaggtggacgatctcttacaacaggtgctggactgcccggcagcagaaagcctttcttatcaacaagctttcttgcgttatctggaaattgacccgctctctgccgacaaaacgcaactgcgggaagtcgcagcgaaactggatttgagcaatgttgctgataccgaagaagaccgcgacacgctgctacaattgctgtttacctttggcgtagagccaaatattggcaaagaaaaaccgacctttgtgtaccactttccagccagccaggcaagtctggcgcaaatcagtaccgaagatcatcgggtcgctgaacgctttgaggtttattataaaggtattgagctggcgaatggtttccatgaattgacggatgcccgtgagcagcaacaacgctttgaacaagataaccgtaagcgcgcggcgcgcggtttgccgcagcaccccattgaccagaatctgattgaagccttgaaagtcggtatgcctgactgttccggcgtggcattaggtgttgatcgtctggtgatgttggcgctgggcgcggagacactggctgaagtcatcgcctttagcgttgaccgggcataattctgaaaaattactgaattaacagcgaagaatggcgtgataagcgccattctgtagcatatgttttcatttttccgttaaaggccacaatttaagactggatatttgatatcatccaggtatcaattctgtattggtttttacgctgcctgctcaatgttgcgcagtgcagttcagtgggcacgtgttatacacgcgctgaaatgaaggatggtttcatgcctcacacgataaaaaagatgagtctgataggactcatattgatgatctttacttccgtatttggatttgccaatagcccaagcgcttattacttaatgggttatagtgcgattcccttttatatattttctgcattgttattctttattccattcgccttaatgatggctgaaatgggagctgcttatcgcaaagaagaaggcggtatctattcctggatgaataatagtgtcggaccacgttttgccttcattggtacgtttatgtggttttcctcttatatcatctggatggtgagtacctccgcgaaagtttgggtaccgttcagtacattcctctatggtagcgacatgacccagcactggcgtattgccggactggagcctacgcaggtggttggtctgctggctgtggcatggatgattctggtcaccgtcgttgcttctaaggggattaataaaattgcccgcattactgcggtgggcggtattgcagtaatgtgtctgaatttagtattgctgttagtaagcattactattttgttattaaatggtgggcatttcgcgcaggatattaatttccttgcaagtccgaacccgggttatcagtccggtctggcaatgctaagctttgtggtatttgccatttttgcctatggcggaattgaagcggttggtggtctggtcgataaaacggaaaatccagaaaagaactttgccaaaggtattgtttttgccgctattgttattagtatcggttatagcctggcaatatttttatggggcgtcagcacaaactggcagcaggtattaagtaatggttccgttaacctcggcaatattacctatgtgctgatgaagagccttgggatgacgctgggtaatgcactgcatttgagtcctgaagcgagtttgagcctgggcgtatggtttgcgcgtattactggacttagcatgttcctcgcctataccggtgcgttctttacgctttgctatagtccgttgaaagccatcatccaggggacgccgaaagcattgtggccggaaccgatgacgcgcctgaatgcgatggggatgccgtctatcgccatgtggatgcagtgcgggttggttactgtcttcatcctgctggttagctttggtggcggtaccgcaagcgcgttctttaacaagctgacgctgatggcgaacgtgtctatgacgcttccttacctgttcctcgcgctggctttcccgttctttaaagcacgtcaggatctcgacagaccgtttgtgattttcaaaacgcatttgagcgcaatgattgcgacagtggttgtcgtactggtggtgacatttgcgaacgtcttcaccatcattcaacctgtggttgaagccggagactgggacagcacattgtggatgattggcggccctgtcttcttcagcctgttagcgatggcgatttaccagaactattgcagcagagtggcaaaaaatccgcagtgggcggtggaataacccgatgccctatcgtctacctgacgatagggcgtaaagacaggaaatgttatggatgacaccagccgggacccggcaataaccgaagatgaaatcagggcgctgcaattttctgccggggatgtagcggaaatagagcagacgattctctcttttgtcgatgcctgccacacccgtaaagtggcgatggtggtgggtagcaccattaacaccctcaaagatcgcgatggtaaacggtggggaaacctgccggatatttattgcgcttatcttatccgatgtctggtttttcgcggggaattagtgggatacggcgatttgtttcgtatgcgctatagcgaaattaagcgaccggttaccttatgagtgcgcgcatgtttgtcttatgctgcatctggtttattgtggcgttcctctggataaccatcacttccgcgctggacaaagagtggatgattgatggacgcgggattaacaacgtctgcgatgtgttgatgtatctcgaagaagacgatacccgtgatgttggtgtgataatgacgttaccgctctttttcccttttctctggttcgctttgtggcgaaaaaaacgcggctggtttatgtacgccaccgcgctggctattttcggctactggctgtggcagttttttctgcgctatcagttttgtttgtgagccggattggttcatccggcacacaaacttacaaacttcccgcctgacgacctttgcccgcagacgtcagcgttctccccgtttgtttaccgttgaggctttccagacgcatctggaagggcgggaatggcatatcgataccgtgggcatggaagccagccagaatcagctggtggatctcatggcgtagcggcatacggtgacccatctcagcggcgtaaatacgcagctcgaaaatctgaatcccctgttgcagatccaccaggaagacttccggtgccgggttgtcgatcaccaggctgcagcgacgcgctgcggtgagcaggatttccgtcacttcttcgctattggcatcggcaggggccggtatcgtcaacaccacgcgcgtgacgctgtcagagaggctccagttgataaactgctcggtaataaacgccttgttcggcacgattatctctttacggtcccagtcgctgatggtggtggcgcgggtgttaattttcgtcacgctaccggtgagatcgcgaattgtcaccgtatcgccaatgcgaatcggtttttcgaacaggataatcagaccagagataaagttggcgaaaatttcctgcaaaccaaaaccgagaccaacaccgagcgcggcaaccagccactgcaatttgctccactcaataccaatcatactgaagccgaccagcccgccaatcagcatcagcagatatttggtgatggtggtgatggcgtaacccgtacccggcgttaaatccaggtgctgcaaaatcgccagttccagcagcgcgggcaagttgcgcaccagctgcgtggtgatgataaacaccagaatggcaatcagcaccgcaccgagggtaattggctccagactttctacgccctgtaccgtggaggtgacatcccacaggctaatattttcgaggaagccgaaagcggaatggatttcactccacagcacaatgacagaaagcagggcgatcaacatcaaaatactgcgcaccagccgcaaggattgcgcactgatggcatcgagatcgacttcgctttcatcgacttcaattgctccttccgggctactgtgatgatgcgcttcctcttcgccacgcgcacgttgcgctaacatctctgcccggcgatgcttcgcccgatcaaacgccagcctgcggcgctggatcagcatccagcggcggataacgtgataaaccaccagtagcaggaaccagatggcaacgctggtttcaagcctcgctaacagcgcctgtgccgttgccagataacccaccgcgctcgccagaatggcaaccaacggcgcgccaatcatcatgttccacagcatatggttggtaatgttgtcgccgctgccctctttgttgagatacagcggaatcccggcctttttcaggctgagggtgaccaccgccagcgcaccgcaaatgaggataaagcaaagccgtcccaggctaccggagaattcacggtcgtcgaggttatcgaacatcatcagcgccataatcagcggcacaataagcccgatgctcatcaggtagtagcgcatcccacgggaaacacgttcgcgcggccagccaaaatgagcgataaacaagccgttcgggcgggcaaaggtggcgcaaatcatcactacccacagcagcggcacggtggccgttacaccatcgccaatcgcgaccgccagcggataaggccacgcctcgcgcaagccgtaacccagcgtcatccacagcaccggtaacggactcgcgacgagaatgctccagaaaagagtgcgcaacgtcagccagaagtgatcctgagtcactttgccaactttcgccgcgctacgttcaagaaaacgggtgaaatagcggcggctgtaaatactgcaaccgaccagaatcaacgcgccaaacagcggcaaaattgtctctttgctggtcagcatcatcacactggctttgcccaactgactgaaggtgtccaggctaatgagacgacgcagatcctgggcgatttccagcggccaggcgatggtcatcgggcgcacgtcagaggtccagaacagatagcggtgcgttgcttcgttcacctctttcagcgcatcctccagttgcccgttggagactttcagcttggtcagttccaatagtagcgtgtcgccaccctgcaacaaactgttcagcaactcacgctgagtgcgcagttgtgcttccagaatacggttttgctcggcagtcagcggctgaccgtcggcctgatgaatttgccgtagcagcggctgtttattaagcagatcctcataacgtaaccgttgcacacgcaactgcgccatttcggtatcaagctgttgtggtttcggcatttccggcagccgtgccacctgcgcccgcagcgcttcgccgagcagattggagcttcccagccattggctctgttcacgcagcgtattcaacgcctgccggacctgtaacgtctggctggcagcctgacgctgttggctggcaacgagatccatccgctgcgcctgttgattcaaagccgcgcttagttcgcggttaattttgaattgcgcgacgatatctttcggcaaatcggcgctgttttctgccagcaattcggtactttccagcgcccgctccgcctcaagctgacgttggctgtttaattgattacgcaaggcctgcaaatacgcatccagttgctggctctctttttccgccagctcactgcgtaagcgcgctaattcctggcggttattggcagacagctgcgccagctccagttcatcaacgagcgccttaagacgtgcagagtcagactgcaacgcgaaattttgtgcctgattgagcggagtattgccggtaagcgttcccaggcggcgctcgatctcatttaactgacggcgggcgtcggtttgctgttgcggcagttgattcaggctatcggcaatctcgcgggcgcgctcctgctcttgctgggcctgacggcttttatccagcaactggctgctgacctggagaatttcctgattcagcgcgtcggtagacattcccgggctcacgctgcgcggctcgtcacgcatgttgtttaattgtgcgcgcagagtagcggagagtttcggataattatcgataacttgctgatattgtttgatgcgctcaagggaaccttttcgttcctcaagcgcatttaaggcagactggagcgcctctacgacttccggctgtgcgggtttcgccgcttttgcctgctccagttcctgagtgatttgtttgctatcgggggccgtcgcggcgtacgccccccaactgaggcaccaggccatcagaaaagtgataatcaggcgcacgtcagcgtttcctttgatggattagacctggtcttttttgtcgtcaaccaatgggctggcgtcgtgttctgcttcgatctcttcagcaggaagcggggcaggttcagcgtctggcgtaacaaaggtttcggtagatactgccagcggctggccaattttcgtgacagacaggctttccagttgctcaaccagattcactttacccggtgcaaacaggttgataacggtggaaccgagtttaaagcgacccatttcctggcctttcagcagtgccacagaaccgtcgttttccccggcaggccaggtccagcgcttgatgataccttcgcgcggcggcgtaatggtgcccgcccagaccgtctcaatgctgccaacaatcgtcgctccgaccagaatctgcgccattgggccaaattcggtatcgaaaaggcaaatcacgcgttcgttacgggcaaacagattcggcacgttctgagccgtgagatggttaacggagaagagatcgcccggcacgtagatcatctcacgcagaataccgttgcacggcatgtgtacgcggtggtagtcacgcggggagaggtaagtggtcacaaacgtaccgttgcggaacaggtccgccatcagatagttgcctgccagcagggcttcgaggctgtagttgtggcctttggcttgcaggattttatcttcttcgattttacccaactggctgataacgccatcggcaggcatgaccagtacattcggatcggtatcgattgggcgtacttcgtcacgcagcggacggacaaagaattcgttaaaggtgcggtagctggcggtgtccggcttttgcgcctctttcatgtcgaccttgtagtatttaacgaacagatcgataaccagttttgtcagccatcctgcccgcttgcttgcgccccaacccgccaggcgagtaagccatagtttcggcagaatgtactgtaggctaagtttaaaactatttaacaaggtagcctccaggccattgttttgtcgttcctgatccggcctacatgccggatcctgaaaaaaaggggacgattctaacgacggttagcttaattgtcagtcatccgtatcagaaaagtttttacgcgtttttacctgcgccatgctttccagaatacggtgatagttttcgaaacgggtttccgcgattttcccttcctcaaccgcttcccggatagcgcagcccggatcggtatcgtgtttgcaatcgcgatatttacacagacctaaatagtcatggaattcgacaaagccctgagtgatttgttccggctccaggtgccagaggccgaactcacgcactcctggggagtcaatcacatcaccgccgtgcgggaagtgatacagccgagcggcggtcgtggtgtgctgaccgagcccgctgttgtcagagatatcgttggtcaggatctctttttgcagccccagcaacgcattcagcaggctggatttgccgacgccagactgcccggcaaaaatgctgatgcgcccggtcaacgcctcttccagcggttttagcccatcctgagtatggctggaaaccatcaatacgcgataaccgatattgcggtagatatccatctgctcgttgacgaacgccatgccttcgtcgtccagcaggtctatcttgttgagcacaataatcggctcaatctgcaaggtttcgcaggccaccaggtaacggtcgataatattgaggctcagctccggcaaaatggcggagacaatgacaatctggtcgatgttggcggcaataggttttacgccgtcgtagaaatccggacgcgtcaacacgctggtacgctcatgcaccgcttccacgatccctttgacatttacgccttccgccgccggtttacccggacgccagactacgcggtcgccggttaccaggctacggatggtacggcgaatattgcagcggtgaacgtcgccatcggcggattccacatcagcgtgcataccaaagcggctgatgacgataccttcatcaggctcgccaaacagattgtcgtcgtagtcgggcttctccttagacgttttaagacgacgctggtgattggcgttcacgcggcgctgctggcctttggagagtttatttttactcaatcgtacagactcctggtcgcccctgatgggcaaaacatctatgatacacgcaattgtggatcaatatagtcactgtgaatgggtggaaaatagcatgagtgccaatgaaaacaacctgatttggatcgatcttgagatgaccggtctggatcccgagcgcgatcgcattattgagattgccacgctggtgaccgatgccaacctgaatattctggcagaagggccgaccattgcagtacaccagtctgatgaacagctggcgctgatggatgactggaacgtgcgcacccataccgccagcgggctggtagagcgcgtgaaagcgagcacgatgggcgatcgggaagctgaactggcaacgctcgaatttttaaaacagtgggtgcctgcgggaaaaagcccgatttgcggtaacagcatcggtcaggaccgtcgtttcctgtttaaatacatgccggagctggaagcctacttccactaccgttatctcgatgtcagcaccctgaaagagctggcgcgccgctggaagccggaaattctggatggttttaccaagcaggggacgcatcaggcgatggatgatatccgtgaaagcgtggcggagctggcttactaccgcgagcattttatcaagctgtaaaatttttcctggtcacgtaagcgccggaatccacttgcggcggcgtgattttgacgctaaattgaacgtcttgctgataatttcagcacttgagataaaaacgcaaaaaaaacttttttggggggttgcagagggaaagatttctcgtataatgcgcctcccgtaacgacgcagaaatgcgaaaattacgaaagcaaaattaagtagtacgcgggaatagctcagttggtagagcacgaccttgccaaggtcggggtcgcgagttcgagtctcgtttcccgctccaaaatttgaaaagtgctgcaaagcacagaccacccaagcgggaatagctcagttggtagagcacgaccttgccaaggtcggggtcgcgagttcgagtctcgtttcccgctccaaaatttgaaagtgctgtaaggcacagaccacccaagcgggaatagctcagttggtagagcacgaccttgccaaggtcggggtcgcgagttcgagtctcgtttcccgctccaaattcttctctcaataaaatatccacagcgacgcgatgcgttattgctggtttttgttgtctctgacaaactcttgtaaacagagttatccacagcctcaggctgtaatcttaatttcaaagaaacttcgcacggtgaatagtatttttttaacctattgatagataagttaaaaattaagattccgttttgtcgagtcgatcacttgacgattttattcgtcttgaattgcaatgcgtttttatttttattcacaagctgtggatgaatcaggcgtcacgcggtaaccctttttcaatcacccgaaccagacgctgttttttcggcaattgcacttcgactatgcacgcatttcgtctctctatttgctgcgcaatcgcccacgctatgtgctcatcgagaagtgggtgctcacctttacgactttccagcgctgtcaaaatcgtttcatcccaaggggcattgcctaatgctacggcgatattacgcagccaacgcaggtgaccaatacgacgaatcgcgcttccttccgtgacttttaaaaacttctcttcgctccaggcgaataactcaatgagttccggtgcgtgtagcggcttacgcgggctgaaatcctcttctgtggtgagttgactatagcgattccacgggcagataagctggcagtcatcgcaaccgtaaatacggtttcccattaacggtcgcaactcttccgggatcgccccttcaagttcgatggtgagataagagatacagcggcgagcatcgacggtatatggctcgacgatggcaccggtcgggcaaatcgtcatacaggccacgcatttgccgcatccttcctcgactggttgatccacgggcagcggaatatcgaccagcaattcgcctaaaaagaagaagctaccggcctcgcgattgaggataagactgtgcttacctgtccagccgagcccagctttttcagctaacgggcgctcgagaataggcgcagaatcgacaaacggtctaaaattcaggctaacacaatgttgctgaatcatctcgcccagctttttgagtcggttgcgcagaagtttgtgatagtcacggcccagcgcataacggctaacatagccgagtttggggtttttcagcgtgctggcaaatgcggcgttagcaggaaggtaattcatccgcacgctgatcacgcgcagcgtaccgggcaataactcatgagggcgagcgcgcagcataccgtgacgtgccatccagtccatttcgccgtggtattgtttgtccagccatgcttgcagtttgggctcggactcgctgagatcggtatcggtaatacctacctgctgaaagcccagttccagcccccactgtttaattttttgcgctaactgattgagatcgaggggctcactcatgacggaccatacaatgaagaaaaaccccgtaagtataccacacaccgtctggtacgccgacgatatccgccgcggagaacgcgaggcggcagatgtgctggggctcacactctatgagctgatgcttcgcgctggcgaggccgcattccaggtgtgtcgtagcgcgtatcctgacgcccgccactggctggtgctgtgcggtcatggtaataacggcggcgatggctacgtggtcgcgcgactggccaaagcggtcggcattgaggtcacgttgttggcccaggagagcgacaaaccgttgccggaagaggccgcgctggcacgcgaagcatggttaaacgcgggtggcgagatccatgctagcaatattgtctggcccgaaagcgtagatctgattgttgatgcgctgctcggtaccggtttgcggcaagcgccccgcgaatccattagccagttaatcgaccacgctaattcccatcctgcgccgattgtggcggttgatatcccttccggcctgctggctgaaactggcgctacgccaggcgcggtgatcaacgccgatcacaccatcacttttattgcgctgaaaccaggcttgctcactggaaaagcgcgggatgttaccggacaactgcattttgacagtctggggctggatagttggctggcaggtcaggagacgaaaattcagcggtttagtgcagaacaactttctcactggctaaaaccgcgtcgcccgactagccataaaggcgatcacgggcggctggtaattatcggtggcgatcacggcacggcgggggctattcgtatgacgggggaagcggcgctgcgtgctggtgctggtttagtccgagtactgacccgcagtgaaaacattgcgccgctgctgactgcacgaccggaattgatggtgcatgaactgacgatggactctcttaccgaaagcctggaatgggccgatgtggtggtgattggtcccggtctgggccagcaagagtgggggaaaaaagcactgcaaaaagttgagaattttcgcaaaccgatgttgtgggatgccgatgcattgaacctgctggcaatcaatcccgataagcgtcacaatcgcgtgatcacgccgcatcctggcgaggccgcacggttgttaggctgttccgtcgctgaaattgaaagtgaccgcttacattgcgccaaacgtctggtacaacgttatggcggcgtagcggtgctgaaaggtgccggaaccgtggtcgccgcccatcctgacgctttaggcattattgatgccggaaatgcaggcatggcgagcggcggcatgggcgatgtgctctctggtattattggcgcattgcttgggcaaaaactgagcccgtatgatgcagcctgtgcaggctgtgtcgcgcacggtgcggcagctgacgtactggcggcgcgttttggaacgcgcgggatgctggcaaccgatctcttttccacgctacagcgtattgttaacccggaagtgactgataaaaaccatgatgaaagcagtaattccgctccctgaataaggaagtgactgataaaaaccatgatgaatcgagtaattccgctccctgatgagcaggcaacattagacctgggcgagcgggtagcgaaagcctgcgatggcgcaaccgtaatctatctgtatggcgatttaggcgcaggtaaaaccacctttagccggggctttttacaggctctgggtcatcagggtaatgtcaaaagccccacttatacgctggtcgaaccctatacgctcgacaacttaatggtctatcactttgatttgtaccgccttgccgatcccgaggagctggagtttatggggatccgcgattattttgccaacgatgccatctgcctggtggagtggccacaacaaggtacaggtgttcttcctgacccggatgtcgaaatacacattgattatcaggcacaaggccgtgaggcgcgcgtgagtgcggtttcctctgcgggtgaattgttgctggcgcgtttagccggttaacctttgaaaggtggcgggatgatgtatcgcatcagaaattggttggtagcgacgctgctgctgctgtgcacgccggtgggtgccgcgacgctctctgatattcaggtttctaacggtaatcaacaggcgcggataacgttgagttttattggcgatcctgattatgcgtttagccatcaaagcaaacgcaccgtggcgctcgatatcaaacaaacgggcgtgattcagggactgccgttgttgttcagcggcaataatctggtgaaggcgattcgctctggaacgcctaaagatgcacaaacgctacggctggtggtcgatcttaccgaaaacggtaaaaccgaagcggtgaagcggcagaatggcagcaattacactgtcgtctttacgattaacgccgatgtgccgccaccgcctcctccgccgcccgtggttgcgaaacgcgttgaaacgcctgcggttgtcgcaccgcgcgtcagcgaaccggcgcgcaatccgtttaaaacggaaagtaaccgcactacgggtgttatcagcagtaatacggtaacgcgtccggcagcgcgcgcgacggctaacactggcgataaaattatcatcgctattgatgccggacacggcggtcaggaccctggcgctatcggccccggtggtacgcgggagaaaaatgtcaccatcgccatcgcgcgtaaattgcgtactttgctcaatgacgatccgatgtttaaaggcgttttaacccgtgacggggattactttatcagcgtgatggggcgcagtgatgtggcacgtaagcaaaacgccaatttcctcgtgagcattcacgctgatgccgcaccgaaccgcagtgcgactggcgcttccgtatgggtgctctctaaccgtcgcgccaacagtgaaatggccagctggctggagcagcacgagaaacagagcgagctgctgggtggggcgggtgatgtgctggcgaacagtcagtctgacccctatttaagccaggcggtgctggatttacagttcggtcattcccagcgggtagggtatgatgtagcgaccagtatgatcagtcagttgcaacgcattggcgaaatacataaacgtcgaccagaacacgccagccttggcgttctgcgcagcccggatatcccaagtgtactggtcgaaaccggttttatcagcaacaacagcgaagaacgtttgctggcgagcgacgattaccaacaacagctggcagaagccatttacaaaggcctgcgcaattacttccttgcgcatccgatgcaatctgcgccgcagggtgcaacggcacaaactgccagtacggtgacgacgccagatcgcacgctgccaaactaaggacgattgatgccaattcaggtcttaccgccacaactggcgaaccagattgccgcaggtgaggtggtcgagcgacctgcgagcgtagtcaaagaactagtggaaaacagcctcgatgcaggtgcgacgcgtatcgatattgatatcgaacgcggtggggcgaaacttatccgcattcgtgataacggctgcggtatcaaaaaagatgagctggcgctggcgctggctcgtcatgccaccagtaaaatcgcctctctggacgatctcgaagccattatcagcctgggctttcgcggtgaggcgctggcgagtatcagtagcgtttcccgcctgacgctcactagtcgcaccgcagaacagcaggaagcctggcaggcctatgccgaagggcgcgatatgaacgtgacggtaaaaccggcggcgcatcctgtggggacgacgctggaggtgctggatctgttctacaacaccccggcgcggcgcaaattcctgcgcaccgagaaaaccgaatttaaccacattgatgagatcatccgccgcattgcgctggcgcgtttcgacgtcacgatcaacctgagccataacggtaaaattgtgcgtcagtaccgcgcagtgccggaaggcgggcaaaaagaacggcgcttaggcgcgatttgcggcaccgcttttcttgaacaagcgctggcgattgaatggcaacacggcgatctcacgctacgcggctgggtggccgatccaaatcacaccacgcccgcactggcagaaattcagtattgctacgtgaacggtcgcatgatgcgcgatcgcctgatcaatcacgcgatccgccaggcctgcgaagacaaactgggggccgatcagcaaccggcatttgtgttgtatctggagatcgacccacatcaggtggacgtcaacgtgcaccccgccaaacacgaagtgcgtttccatcagagccgtctggtgcatgattttatctatcagggcgtgctgagcgtgctacaacagcaactggaaacgccgctaccgctggacgatgaaccccaacctgcaccgcgttccattccggaaaaccgcgtggcggcggggcgcaatcactttgcagaaccggcagctcgtgagccggtagctccgcgctacactcctgcgccagcaagtggcagtcgtccggctgccccctggccgaatgcgcagccaggctaccagaaacagcaaggtgaagtgtatcgccagcttttgcaaacgcccgcgccgatgcaaaaattaaaagcgccggaaccgcaggaacctgcacttgcggcgaacagtcagagttttggtcgggtactgactatcgtccattccgactgtgcgttgctggagcgcgacggcaacattagtcttttatccttgccagtggcagaacgttggctgcgtcaggcacaattgacgccgggtgaagcgcccgtttgcgcccagccgctgctgattccgttgcggctaaaagtttctgccgaagaaaaaagcgcattagaaaaagcgcagtctgccctggcggaattgggtattgatttccagagtgatgcacagcatgtgaccatcagggcagtgcctttacccttacgccaacaaaatttacaaatcttgattcctgaactgataggctacctggcgaagcagtccgtattcgaacctggcaatattgcgcagtggattgcacgaaatctgatgagcgaacatgcgcagtggagtatggcacaggccataaccctgctggcggacgtggaacggttatgtccgcaacttgtgaaaacgccgccgggtggtctgttacaatctgttgatttacatccggcgataaaagccctgaaagatgagtgatatcagtaaggcgagcctgcctaaggcgatttttttgatggggccgacggcctccggtaaaacggcgttagccattgagctgcgtaaaattttaccagtagagttgataagcgttgattctgcccttatttacaaagggatggatatcgggacggcgaagccgaacgctgaagagttactcgccgcgccgcaccgattgctggatattcgcgatccgagccaggcttacagcgctgctgattttcgccgcgatgcgctggcggaaatggccgatatcaccgcggcggggcggatcccactgttagtgggcggtacgatgttgtatttcaaggcattgctggaagggttgagcccgctaccgagcgcagacccggaagtacgggccagaattgagcaacaggcggcagagcaaggttgggagagtttgcatcgtcaacttcaggaggtagatccggttgcggcagcaaggattcatccaaatgatccacaaaggctttcccgggcactggaagtttttttcattagcggtaaaactttaacggaactgacgcaaacgagtggagacgctctaccgtatcaggtgcatcagttcgccatcgccccggcgagccgtgaactgctccatcaacgcattgagcagcgttttcatcagatgttggctagtggttttgaagcagaagtccgggcgctttttgcccgaggagatttgcatacggacttgccttccattcgttgcgtgggttatcgccagatgtggtcttaccttgaaggcgaaatcagttacgatgaaatggtttatcgaggtgtttgcgccacgagacagttggcgaagcggcagataacctggctgcgtggttgggaaggggttcactggcttgacagtgaaaaaccagaacaggcgcgtgacgaagtattacaggttgttggtgctatcgcaggctgaatgtgtacaattgagacgtatcgtgcgcaattttttcagaatcgaaaggttcaaagtacaaataagcatataaggaaaagagagaatggctaaggggcaatctttacaagatccgttcctgaacgcactgcgtcgggaacgtgttccagtttctatttatttggtgaatggtattaagctgcaagggcaaatcgagtcttttgatcagttcgtgatcctgttgaaaaacacggtcagccagatggtttacaagcacgcgatttctactgttgtcccgtctcgcccggtttctcatcacagtaacaacgccggtggcggtaccagcagtaactaccatcatggtagcagcgcgcagaatacttccgcgcaacaggacagcgaagaaaccgaataaggtttcgggctgtttttttacacggggagccagcgatcctgcgttccccgctgatctatttagagggttatacgcttgtttgaccgttatgatgctggtgagcaggcggtactggtacacatctattttacgcaagacaaagatatggaagacctccaggagtttgaatctctggtctcttccgccggtgtcgaagcattgcaggtgattaccggtagccgtaaagcgccgcacccaaagtattttgtaggtgaaggtaaagcagttgaaattgcggaagctgtcaaagcgacgggtgctagcgtcgttctttttgaccatgccctgagcccggcgcaagagcgtaacctggagcgtttgtgcgagtgtcgtgttatcgaccgcaccggccttattttagatattttcgcccaacgtgcgcgtacccatgagggtaagttgcaggttgagctggcgcagctgcgccatctggctacgcgcctggtgcgtggctggacccaccttgaaagacagaaaggcgggataggtttgcgtggtccgggtgaaacccagctcgaaaccgaccgtcgtttgttgcgtaatcgcatcgtgcagatacagagccgcctggaaagagttgaaaagcagcgtgagcaggggcggcaaagccgtatcaaagccgacgttcctactgttagcctggtgggatataccaacgccggtaaatctacccttttcaatcgcatcaccgaagcgcgggtctacgcggcagaccagttgtttgccaccctcgacccgacgttgcggcgtattgacgttgcagatgtcggtgaaaccgtacttgcagataccgtagggtttattcgccacctgccgcacgatctggtggcggcatttaaagccacgttacaagagacgcggcaagccacattactgctgcacgtcattgatgcggcggatgtgcgtgtacaagaaaacatcgaagcggtgaatacggttcttgaagagatcgacgctcacgagatcccaaccctgctggtgatgaacaagatcgatatgctggaagatttcgaaccgcgtattgatcgggacgaagagaacaaaccgaaccgtgtctggctttccgcacagaccggagcggggataccacagctttttcaggctttgacggagcggctttccggcgaggtggcgcagcatacattgcgtctgccaccgcaggaagggcgtctgagaagtcgtttttatcagcttcaggcaatagaaaaagagtggatggaggaggacggcagcgtaagtctgcaagttcgtatgccgatcgttgactggcgtcgcctctgtaaacaagaaccggcgttgatcgattacctgatctaacggcgtagcgtctgaagcgtggagtcatatcctctggcgtcgaaagacaacagggatcaccgcataacaaatatggagcacaaacatggcgtggaatcagcccggtaataacggacaagaccgcgacccgtggggaagcagcaaacctggcggcaactctgagggaaatggaaacaaaggcggtcgcgatcaagggccacctgatttagatgatatcttccgcaaactgagcaaaaagctcggtggtctgggcggcggtaaaggcaccggatctggcggtggcagtagtagccaaggcccgcgcccgcagcttggcggtcgtgtcgttaccatcgcagcggcagcgattgtcattatctgggcggccagtggtttctataccattaaagaagccgaacgcggcgtggtaacacgctttggtaaattcagccatctggttgagccgggtctgaactggaaaccgacgtttatcgacgaagtcaaaccggtgaacgtggaagccgtgcgtgaactggccgcttctggtgtgatgctgacgagcgacgagaacgtagtgcgcgttgagatgaacgtgcagtaccgcgtcaccaatccggaaaaatatctgtatagcgtgaccagcccggatgacagcctgcgtcaggctaccgacagcgccctgcgtggagttatcggtaaatacaccatggaccgcattctgacggaaggtcgtaccgtgattcgtagcgatactcagcgcgaactggaagagacgattcgtccgtatgacatgggtatcacgctgctggacgtcaacttccaggctgctcgtccgccggaagaagtaaaagcggcgtttgacgatgcgattgccgcgcgtgaaaacgaacagcaatacattcgtgaagcagaagcgtataccaacgaagttcagccgcgtgcgaacggtcaggcgcaacgtatcctcgaagaggcgcgtgcgtacaaggcccagaccatcctggaagctcagggtgaagtggcgcgctttgctaaacttctgccggaatataaagccgcgccggaaattactcgcgagcgtctgtatatcgagacgatggaaaaagtgttgggtaacacccgcaaagtgctggttaacgataaaggtggcaacctgatggttctgccgttagaccagatgctgaaaggtggtaacgcccctgcggcgaagagcgataacggtgccagcaatctgctgcgtctgccgccagcctcttcctccacaaccagtggagcaagcaacacgagctccaccagtcagggcgatattatggaccaacgccgcgccaacgcgcagcgtaacgactaccagcgtcagggggaataacgatgcgtaagagtgttatcgcgattatcatcatcgtgctggtagtgctttacatgtctgtctttgtcgtcaaagaaggtgagcgcggtattacgctgcgttttggtaaggtactgcgtgacgatgacaacaaacctctggtttatgagccgggtctgcatttcaagataccgttcattgaaacggtgaaaatgctcgacgcacgtattcagaccatggacaaccaggccgaccgctttgtgaccaaagagaagaaagacctgatcgtcgactcttacatcaaatggcgcatcagcgatttcagccgttactacctggcaacgggtggtggcgacattagccaagcggaagtgctgttgaaacgtaagttctctgaccgtctgcgttctgaaattggtcgcctggacgtgaaagatatcgtcaccgattcccgtggtcgtctgaccctcgaagtacgtgacgcgctgaactccggttctgcgggtacagaagatgaagttactaccccggcggcagataacgccattgccgaagcggcagagcgcgtaacggctgagacgaagggcaaagttccggtcatcaacccgaacagtatggcggcgctgggtattgaagttgtcgatgtgcgtatcaagcagatcaacctgccgaccgaagtgtctgaagcgatctacaaccgtatgcgcgccgagcgtgaagcggtagcgcgtcgtcaccgtagtcaaggtcaggaagaagcggaaaaactgcgcgcgactgccgactatgaagtgaccagaacgctggcagaagctgagcgtcagggccgcatcatgcgtggtgaaggcgatgccgaagcagccaaactgtttgctgatgcattcagtaaagatccggacttctacgcattcatccgtagcctgcgtgcttatgagaacagcttctctggcaatcaggacgtgatggtcatgagcccggatagcgatttcttccgctacatgaagacgccgacttccgcaacgcgttaatataacgactgcggtacaggtcaataaagccaccgcatcctcagggatgtcggtggttttctttttctataaggataatgaatgaatagcacaatctggctggcgcttgccctggttttggtactggaaggtttagggccgatgctttacccgaaggcatggaagaagatgatctctgcgatgaccaatttgcccgataatattttacgtcgttttggcggtggacttgtggttgcgggcgttgtggtctactacatgttgaggaaaacgattggctgaacaaaaaacagactgatcgaggtcatttttgagtgcaaaaagtgctgtaactctgaaaaagcgatggtagaatccatttttaagcaaacggtgattttgaaaaatgggtaacaacgtcgtcgtactgggcacccaatggggtgacgaaggtaaaggtaagatcgtcgatcttctgactgaacgggctaaatatgttgtacgctaccagggcggtcacaacgcaggccatactctcgtaatcaacggtgaaaaaaccgttctccatcttattccaagtggtattctccgcgagaatgtaaccagcatcatcggtaacggtgttgtgctgtctccggccgcgctgatgaaagagatgaaagaactggaagaccgtggcatccccgttcgtgagcgtctgctgctgtctgaagcatgtccgctgatccttgattatcacgttgcgctggataacgcgcgtgagaaagcgcgtggcgcgaaagcgatcggcaccaccggtcgtggtatcgggcctgcttatgaagataaagtagcacgtcgcggtctgcgtgttggcgaccttttcgacaaagaaaccttcgctgaaaaactgaaagaagtgatggaatatcacaacttccagttggttaactactacaaagctgaagcggttgattaccagaaagttctggatgatacgatggctgttgccgacatcctgacttctatggtggttgacgtttctgacctgctcgaccaggcgcgtcagcgtggcgatttcgtcatgtttgaaggtgcgcagggtacgctgctggatatcgaccacggtacttatccgtacgtaacttcttccaacaccactgctggtggcgtggcgaccggttccggcctgggcccgcgttatgttgattacgttctgggtatcctcaaagcttactccactcgtgtaggtgcaggtccgttcccgaccgaactgtttgatgaaactggcgagttcctctgcaagcagggtaacgaattcggcgcaactacggggcgtcgtcgtcgtaccggctggctggacaccgttgccgttcgtcgtgcggtacagctgaactccctgtctggcttctgcctgactaaactggacgttctggatggcctgaaagaggttaaactctgcgtggcttaccgtatgccggatggtcgcgaagtgactaccactccgctggcagctgacgactggaaaggtgtagagccgatttacgaaaccatgccgggctggtctgaatccaccttcggcgtgaaagatcgtagcggcctgccgcaggcggcgctgaactatatcaagcgtattgaagagctgactggtgtgccgatcgatatcatctctaccggtccggatcgtactgaaaccatgattctgcgcgacccgttcgacgcgtaattctggtacgcctggcagatattttgcctgccgggcgaacagtgtgatacattgctgtgtcgggtaagccattacgctatccgacacagtgttaaatcctcgcttttttccttccccgaactgaaataaattagcgacacagcttgtggctggtttatcatcaatataaatgtattttttcccgatttcccttttgaggttgatgtgcagttaacgagtttcactgattacggattacgtgcgctgatctacatggcgagtttgccagaagggcggatgaccagtatttctgaagtgactgacgtctacggcgtctcccgtaatcatatggtcaaaataatcaatcaacttagtcgtgccggctacgtgactgctgttcgtggaaaaaatggcggcattcgcctgggtaaaccggcgagtgcgatacgtattggtgatgtggtgcgcgagctggagcccttaagcctggtgaattgcagcagtgagttttgccacattacacctgcctgtaggttgaaacaggcactttctaaggccgtgcaaagttttcttacggaactggataactacacgcttgccgatttggttgaagagaatcaaccgctttataaattattgctggtggagtgacgaaaatcttcatcagagatgacaacggaggaaccgagatgagtcaagatcctttccaggaacgcgaagctgaaaaatacgcgaatcccatccctagtcgggaatttatcctcgaacatttaaccaaacgtgaaaaaccggccagccgtgatgagctggcggtagaactgcacattgaaggcgaagagcagcttgaaggcctgcgtcgccgcctgcgcgcgatggagcgcgatggtcaactggtcttcactcgtcgtcagtgctatgcgctgccggaacgcctcgacctggtgaaaggtaccgttattggccaccgtgatggctacggctttctgcgggttgaagggcgtaaagatgatttgtatctctccagcgagcagatgaaaacctgcattcatggcgatcaggtgctggctcagccgctgggtgctgaccgtaaaggtcgtcgtgaagcgcgtattgtccgcgtactggtgccaaaaaccagccagattgttggtcgctactttaccgaagcgggcgtcggctttgtggttcctgacgacagccgtctgagcttcgatatcttaatcccgcccgatcagatcatgggcgcgcggatgggctttgtggtcgtagtcgaactgactcagcgtccgactcgccgcaccaaagcggtgggtaaaatcgtcgaagtgctgggcgacaatatgggcaccggcatggcggttgatatcgctctgcgtacccatgaaattccgtacatctggccgcaggctgttgagcaacaggttgccgggctgaaagaagaagtgccggaagaagcaaaagcgggccgtgttgatctgcgcgatttaccgctggtcaccattgatggcgaagacgcccgtgactttgacgatgcagtttactgcgagaaaaaacgcggcggcggctggcgtttatgggtcgcgattgccgacgtcagctactatgtgcgtccgagtacgccgctggacagagaagcgcgtaaccgtggcacgagcgtgtacttccctagccaggttatcccgatgctgccggaagtgctctctaacggcctgtgtagcctcaacccgcaggtagaccgcctgtgtatggtgtgcgagatgacggttagcagcaaaggccgcctgacgggctacaaattctacgaagcggtgatgagctctcacgcgcgtctgacctacaccaaagtctggcatattctgcagggcgatcaggatctgcgcgagcagtacgccccgctggttaagcatctcgaagagttgcataacctctataaagtgctggataaagcccgtgaagaacgcggtgggatcagttttgagagcgaagaagcgaagttcattttcaacgctgaacgccgtattgaacgtatcgaacagacccagcgtaacgacgcgcacaaattaattgaagagtgcatgattctggcgaatatcagcgcggcgcgtttcgttgagaaagcgaaagaaccggcactgttccgtattcacgacaagccgagcaccgaagcgattacctctttccgtagtgtgctggcggagctggggctggaactgccgggcggtaacaagccggaaccgcgtgactacgcggagctgctggagagcgttgccgatcgtcctgatgcagaaatgctgcaaaccatgctgctgcgcagcatgaaacaggcgatttacgatccagaaaaccgtggtcactttggcctggcattgcagtcctatgcgcactttactagcccgattcgtcgttatccagacctgacgctgcaccgcgccattaaatatctgctggcgaaagagcaggggcatcagggcaacaccactgaaaccggcggctaccattatagcatggaagagatgctgcaactgggtcagcactgtagcatggcggaacgtcgtgccgacgaagcaacgcgcgatgtggctgactggctgaagtgtgacttcatgctcgaccaggtaggtaacgtctttaaaggcgtaatttccagcgtcactggctttggcttcttcgtccgtctggacgacttgttcattgatggtctggtccatgtctctagcctggacaatgactactatcgctttgaccaggtagggcaacgcctgatgggggaatccagcggccagacttatcgcctgggcgatcgcgtggaagttcgcgtcgaagcggttaatatggacgagcgcaaaatcgactttagcctgatctccagcgaacgcgcaccgcgcaacgtcggtaaaacggcgcgcgagaaagcgaaaaaaggcgatgcaggtaaaaaaggcggcaagcgtcgtcaggtcggtaaaaaggtaaactttgagccagacagcgccttccgcggtgagaaaaaaacgaagccgaaagcggcgaagaaagacgcgagaaaagcgaaaaagccaagcgcgaaaacgcagaaaatagctgcagcgaccaaagcgaagcgtgcggcgaagaaaaaagtggcagagtgatcaataccctctttaaaagaagagggttagattgctgacaaaatgcgctttgttcatgccggatgcggcgtgaacgccttatccggcctacataatcacgcaaattcaatatattgcagagatcatgtaggccggataaacgtagtgcatcaggcaaaacgtaaacaacgagtacattaatgagcgaaatgatttacggcatccacgcagtgcaggccctgctggagcgcgcccctgaacgttttcaggaagtctttattttaaaaggccgtgaagataaacgtctgttaccgctgattcacgcccttgagtctcagggcgtggttatccagttggcaaaccgccaatatctcgacgagaaaagcgacggtgccgtgcatcagggcattatcgcccgcgtgaagccaggacgtcagtatcaggaaaacgatctgccggatctgatcgctagcctcgatcaaccgttcctgctgatcctcgacggcgtaaccgatccgcacaacctcggcgcgtgcctgcgtagtgcggacgccgcaggcgttcatgcggtgattgtgccgaaagatcgctccgcacagctcaacgctacggcgaaaaaagtagcctgcggcgcggcagaaagcgttccgctgattcgggtgactaaccttgcgcgcaccatgcgtatgttgcaggaagagaatatctggatcgtcggtacggcaggcgaggcggatcatacactctatcagagcaaaatgaccggacgcctggcgctggtgatgggtgcggaaggtgaaggtatgcgtcgcctgactcgtgaacattgcgatgagttgatcagcatcccgatggctggaagcgtttcttccctgaacgttagcgttgcgaccggaatttgcttatttgaagcggtgcgccagcgcagctaatttctcagaattatgaaaagccatccagatttggatggtttttttttgtctatagctggtaagataattacgtattgcaaatattcattttattaatatttaaacttaatctatatggaataatatatgacatggaatccgttggcgctagcgacggcgctgcaaactgtacctgaacaaaatattgatgtaacaaatagcgagaacgcattaattattaaaatgaatgattatggcgatttgcaaatcaatattctttttacttcccgccaaatgattatcgaaacctttatttgtccggtgagtagtatcagcaatccagatgaatttaataccttcttattaagaaatcagaagatgatgccgttgagtagcgtagggatctccagcgtacaacaggaagagtattacattgttttcggggcgttaagccttaaatcttctcttgaagatatcctgcttgagataaccagcctggtagataacgcattggatctggctgaaattacagaagaatatagtcactaattacaaggacgggtatttatgggaattttaaaaagtttatttacgctggggaaaagctttatctcccaggcggaagaatccattgaagaaacccagggcgtgcgcatgctggaacagcatattcgtgacgctaaagctgaactcgataaagccggaaaatctcgcgttgatctgctggcgcgggtgaaattaagtcacgataagctgaaagatttacgtgagcgcaaagccagtctggaagcccgtgcgctggaagcgttaagcaagaacgttaatccgagcttgattaacgaagttgctgaagaaatcgcgcgccttgagaatctcattaccgctgaagagcaagtgttgagcaatctggaagtctcccgtgatggcgtggaaaaagcagttacagcgacagcgcagcgtatcgctcagtttgagcagcaaatggaagtcgttaaagccactgaagccatgcagcgtgcacaacaggctgtaacaacctctaccgttggcgcatcttccagcgttagcacagcggcagaatccttaaaacgcctgcaaacgcgtcaggccgaacgtcaggctcgcctggatgctgccgcacagttggagaaagtcgcagacggtcgcgaccttgacgaaaagctggcggaagccggaattggcggtagcaataaaagtagcgcccaggatgtattagcaagactgcaacgccaacagggcgagtaatttttttgccagcctcgctaaaaggctggcaactattttaaggataaaatatgtctggttttttccagcgtctgtttggcaaggataataagccagctatcgctcgtggtccgctgggacttcatctcaatagtggctttacgctcgacacgttagcgtttcgtttgctggaagatgaattgctgattgcgctgccgggtgaggaatttacggtagccgccgtcagccacatcgatctgggcggcggtagtcagattttccgctactacactagtggcgatgagtttctgcaaatcaataccaccggcggcgaagatattgatgacattgatgatatcaagctctttgtctatgaagagagctacggtatcagtaaagagagtcactggcgcgaggcgatcaacgccaaagcgatgggagcaatgaccttaaactggcaggaaaaacgctggcagcgattttttaacagcgaagaaccgggaaatatcgaacccgtctacatgctggaaaaagtagaaaatcaaaaccatgccaaatgggaggtccataattttaccatgggctaccaacggcaagtaaccgaagatacttacgaatatttgctgctaaatggtgaggaatcttttaacgatctcggcgagccagagtggttatttagccgcgcgttgggtgtcgatatcccgctgacaagtcttcatattattggttaattacaaggacgtttacaatgcatatactggatagtcttcttgcctttagcgcctatttttttattggcgtggctatggtgattatttttctgtttatctattctaaaattacaccgcacaacgaatggcagttaatcaaaaacaataataccgcggcgagtctggcgttcagcggtacattgttgggttacgttatccccttatccagtgcggcaatcaatgcggtgagtattccagactatttcgcctggggcgggattgcactggtgattcagttactcgtttttgctggtgtcagactttatatgcccgcattaagcgaaaaaattattaatcacaataccgcagcaggaatgtttatgggaaccgccgcgctggctggcggtatttttaacgcagcttgtatgacatggtaatggacgatcatggccagaaaacgcaaaagtagaaataacagtaaaattggtcacggagcgattagtcgcattggtagaccgaataatccttttgaaccgtgccgcaatcgctacgcacaaaaatacttaacgttggcgctaatgggcggtgccgcttttttcgtattgaaaggttgtagcgatagtagcgatgtcgataacgacggcgacggaacgttttacgcgacagtgcaggattgtattgatgacggtaataatgccgacatttgcgcgcgtggctggaacaacgccaaaacggcattttatgccgatgttccgaagaatatgactcagcagaactgtcagtctaagtacgaaaattgctactacgacaatgttgaacagagttggatcccggtcgtttctggatttttgttaagccgggttattcgtaaagatcgcgatgagccgtttgtttataacagcggcggttcctcttttgctagccgcccagtctggcgcagcacttctggtgattactcctggcgctccggttctggcaaaaaagagtcttactctagcggcggctttaccaccaaaaaagcgtctaccgtttctcgcggcggctatggtcgttcttccagcgcccgtgggcattggggaggctaatcatgctgagacacaacgttcctgtgcgacgggatctggaccagatcgccgctgacaacggtttcgactttcatatcatcgacaatgaaatctattgggatgagagtcgggcttaccgttttactctgcgccagattgaagagcagatcgaaaaaccgactgcggaactgcatcagatgtgccttgaggtggtggatcgcgcggtaaaagatgaagagatcctgacgcaactggcgatcccgccgttgtactgggatgtgatcgctgaaagctggcgcgcccgcgatcctagcctgtatggacggatggattttgcctggtgtggcaatgcgccggtgaagctgctggagtacaacgccgatacgccaactagtttgtacgagagcgcttatttccagtggctgtggctggaggatgcccggcgcagcggcattattccgcgtgatgccgatcagtacaatgctattcaggaacgcctgattagtcgctttagcgagctttacagtcgggaaccgttttatttttgctgctgtcaggacaccgatgaagacaggagtaccgtgctgtacttgcaggactgcgcccagcaggcagggcaggagagccggtttatctacattgaagatctcggtttgggcgtcggcggcgtactgaccgatcttgatgataatgtcatccagcgtgcatttaagctgtatccgctggagtggatgatgcgtgacgataacggtccgctgctgcgcaagcgtcgcgagcaatgggtggagccgttatggaaaagtatcttgagtaataaagggctaatgccgctgctttggcgcttcttccctggtcatcctaatcttcttgcgtcctggttcgatggcgagaaaccgcagattgccgctggcgaaagctatgtgcgtaaaccaatctatagccgcgaaggcggcaacgtcaccatttttgacggcaagaataacgttgttgaccacgctgatggtgattacgccgatgaaccgatgatctaccaggcgtttcaacctctgccgcggtttggcgatagctacacactcatcggtagctggattgtcgatgatgaagcgtgcggaatggggatccgtgaagataacacactgatcaccaaagacaccagtcgtttcgttccgcattacattgctggataagaatgttttagcaatctctttctgtcatgaatccatggcagtgaccatactaatggtgactgccattgatggagggagacacagtgcactggcaaactcacaccgtttttaatcaacctataccattaaataacagcaacttatacctgtctgatggcgcgctctgcgaagcggtaacgcgtgaaggtgctggctgggatagcgattttctagccagtattggtcagcagttaggaacggctgaatcccttgaactggggcggctggcgaatgtgaatccgcctgaattattgcgctacgatgcgcaaggacgccgtctggacgatgtgcgttttcaccccgcctggcacctgctgatgcaggcgctatgtaccaatcgggtgcacaatcttgcctgggaagaagacgctcgctccggcgcatttgtggcgcgcgcggcgcgttttatgttacatgcgcaggttgaggcagggagcttatgtccgataaccatgacctttgccgccacgccattgttgttacagatgttacccgcgccgtttcaggactggaccacgccgctattgagcgatcgctacgattctcacttattgccaggtgggcaaaaacgcggtttgttgattggcatgggaatgacggaaaagcagggcggttccgatgttatgagcaacaccacccgtgcagagcgtctggaagatggctcttatcggctggtggggcataaatggtttttcagcgttccgcaaagcgatgcgcatctggtgctggcgcagaccgcgggtggtctgtcctgcttttttgtgccgcgctttttgcctgacgggcaacgcaacgcgattcgcctcgagcggctgaaagataagctgggtaatcgctctaacgccagttgcgaagtggagtttcaggatgccattggttggttgttggggctggaaggggaaggaattcgtctgatcctgaaaatgggtgggatgacgcgttttgattgcgccctgggtagccatgccatgatgcgccgtgcatttagcctggcgatttatcatgcacatcaacgccatgtttttggtaatccattgatccaacagccccttatgcgtcatgtcttaagtcgcatggcacttcagcttgaagggcaaacggcgttgctgtttcgtcttgcgcgagcgtgggaccggcgtgccgatgccaaagaagccctgtgggcgcgtttatttacgcctgcggcaaaatttgtgatctgcaaaagaggtatgccgtttgtggccgaagcgatggaggtgctgggcggcattggttattgcgaggagagtgagctgccgcggctttaccgggagatgccggtaaacagtatttgggaaggttccggcaatattatgtgcctggatgtgttgcgcgttctcaataagcaagcgggcgtatacgacttattgagcgaagcatttgtggaagtgaaagggcaggatcgctattttgatcgcgcggttcgtcgtttacagcagcagctgcgtaagccagctgaagaactggggcgagagattactcatcagctattcctgctgggctgcggtgcgcaaatgttgaaatatgcttctccgccaatggcgcaggcgtggtgtcaggtgatgttagatacgcgcggcggcgtacggttgagtgagcagatccagaatgatttattgctgcgggcgacggggggagtgtgtgtgtaagcgtatacgactgatgcgacgctggtttcgattaactaaatgaaatatgtgaaaattgtaggccggacaaggcgctcgcgccgcatccggcattgttcatttgctgtagatgacactcatgcatacagtatcgcctgtacgcgccagttatcaggctgctggtcttcgtacatggtaataatgcggtaccaactcgcaccttgttcatcggcctttaacgccacgatacgttccacgtcctgcggatccccactaatattgctaacactgatctgacctatttcattcaggcccgtcacgcagtcagcactggcgaattctgcagactgtgccgtggcgctcgcaggataagtcactaattgcaggctgggactggcaagtaattgtttcatcgtcagctccatttttcgtttccccacatgttgcagggcattccatcgcggtaataaacgcccaggcttccagccggtaatttattgtgcacaggtaaacgcatagggacgcaaagcaatgtaaagctgactatgtaagttgtctgatttatttacggtacaaaatggcttgactataccactgtcctgtcacgatggtttcgtccaccatgacgacaacgtaataatcagcttttgcagcgacagctttcgctttgatttctgctaatgcgtcatccggagaaccccgaaccatcgtgcttacgctacctattcgctgtaacccttgcgtctggtcgcggcgaatctcttgcggatggtccgttactggcggtgctggctgtggcgtaccttgcagtgcgctacaggcacttaacatcaacaccaataataaactggcaaaccggtaaataacgctattacgtttcctgctaaccatagtgtagtgccttattaatttaactttgggggaatgttcccgaattgttacctggtacgcgattttcgaatgaaaacgtgacgaaagcgtaacccacatctcaacattatgaactaataccgccagcagaaacttgtgctaaggatttcttcatgtcataccagacaaaaaggagagacagatgattgaaatagaaagtcgcgagctggcagatattcccgttcttcatgcttatcctgtcgggcaaaaagataccccgttaccgtgcgtaattttttatcacggctttactagttccagtctggtgtatagctattttgccgttgcgctggcgcaggctggtttgcgggtgatcatgccggatgcgcccgatcacggtagccgttttagtggtgacgcagcgcggcggttaaatcaattctggcaaatcttgctacaaagtatgcaggaattcactactttacgtgcggcaatagccgaagaaaactggctgcttgatgaccgtctggcagtcggtggcgcgagcatgggcgcgatgacggcactggggattaccgctcgccaccccacggtgagatgtaccgccagcatgatgggaagcggctattttacaagtctcgcccgtagtctgtttccaccgctgatacctgaaacggcagcacagcagaatgaattcaataacattgtcgcgccactggcagagtgggaagcgacaaaccacctggaacaacttagtgacagacctctactgctgtggcatggcctcgacgatgacgttgtgcctgccgacgaaagtctacgtttgcagcaggccttaagcgagacgggacgggataaactgctaacctgtagttggcagccaggcgtgcgtcaccgcattacgcctgaggcgttagatgctgccgtgacatttttccgccagcatctttaaacacgcagaatgctgaccccttgcgcttccagttgttgcaggatttccgggttagcatttttgccggtgataagcatatcgatttgatcggcacggctaaaaagcattcccgcgcgttcgccaatcttactgctatcaaccagtaccaccagtttccctaccacgctcagcatcttctgctctgccattgctgtcagcatatcggttttatacaacccttctgcggtcagcccttttccgctggtaaacatccagtgcccggcatagagactgttttcgctgccctgcgggcttaaagtgatggactgacttttgttgtactgtccgcccataatgatcacgctgtcatgttcttgatcgatcaggtaatttgccagcggtagataattagtgatgatttgcactggcttgccacacatttcccgcccaagcagaaacgcggtggagccgcagttgatgactacgctttcgcccggattaaccagctggctggccgctttagcgatacgtactttttcatcgtgattctgcgcctgatgcagattcatcggcgtccagcgcgggcgctgttgggtaatagcttctgcgccattgcgcacttttttcagtttgccgctttcgtcaagtttattgatatcgcgtcgcgcagtggcagggctaattcccagacgctcaacgactttctcaacggtcacaaagcccaattgtgcgagcatttccaggaggatttgatgtctttgtgcttcagtcatgagctattccgataaaatttgatttttttagatgatatttgaaatagccaggaaatactacgccggatagcgcgaacttctccacgctacccggtataaacgacagattacaggaaactcttgaacggcagatccggttcaatagtgaagcaatcatcgaaaccgcgcggatagtggtactcgaagttgtctttatccagcggccaggtaaatttgccacccacctgccagataaacggcttgaagccatacttcaggcgatcttttttcatctcccacagcacgcggatctcttgcggatcggcctggaagttactccagatatcgtggtggaacgggatcactactttcgcattcagcgcttcacccatacgcagcatatcggcgctggtcattttgtcggtgataccgcgcgggttttcgccgtagcttcctaacgccacgtcgatctgatgttcgttaccgtgcttcgcataatagttagagtagtgggagtcgccgctgtgatacagggagccgccaggcgttttgaacaggtagttcaccgcgcgatcgtccatgccatctggcagtacgccagccgctttttgatcggcaggcagggtgatcagtgcagtacggtcgaaagcatcaagcgcatgaatttcaatgtctttcacttttactacatcgcccggtttgaccacgatgcaacgctctttcggtacgccccagccaatccacaaatccacacaggttttcggtccgataaacggtacgtcatctgcacaattctgcatcacggcagcagcgacgttaacgtcgatatgatcgttgtgatcgtgagtcgccagtaccgcgtcgatctggcgaatcgcaaacggatcaagaacaaacggggtggtacgcaggtttggctgcagttttttcacgccagccatgcgctgcatctggtgaccctgtttcattaacgggttaccgtgactttgtttgccagtgccgcaccagaaatcaacgcaaacgttggtgccaccttcgcttttcaaccagatcccggtgcagccaagccaccacatcgcaaatgtgccaggagcgacctgttcttgttcaatttcttcattcaaccagctaccccactccgggaaagtgctcaggatccaggattcacgggtgatacttttcactttactcatcgccatttaccttcatgatagttcaattcgaatcaatatgtgattggttttgattaatcctgacactattttttcaggaaggcaatgaccattttttgactttttgccagggaagttgttgttgattttgagtatggaaagatttaatggaatgtgtaattcaattaactaaatgaatttaaatggataattgtttcgttgtgtgaatcccactctatccatgtggaattatttgcgggtcgcgtcacatttaatcataaataatcttgttgtgattacttttgaaaattagagtgagtgcacaacattccgggtgtgtggaatacccggttacctcttcttcaggagatcgttatggagatcctctacaacatctttaccgtgttttttaaccaggtcatgaccaatgccccgttgttgctgggtattgtgacctgtctgggctacatcctactgcgcaaaagtgtcagcgttattattaaaggcacgattaaaaccataattggtttcatgttgttgcaggcagggtccggcatcctcaccagcaccttcaaaccggtggtggcgaaaatgtccgaagtctacggcattaacggcgcaatttccgatacctacgctagtatgatggcaaccatcgaccgcatgggcgatgcctatagctgggtgggttacgccgtattgttagcgctggcgctgaacatctgttacgtgctgttgcgtcgcattaccggcattcgcacaatcatgttgaccggccacatcatgttccagcaggccgggttgattgccgttacgctgtttatcttcggctactccatgtggaccaccattatctgtaccgcgattctggttagcctctactggggcatcacttccaacatgatgtacaagccgactcaggaagtgacggatggctgtggtttctccatcggtcaccagcagcagtttgcaagttggattgcctataaagtcgcgccgttcctcggcaaaaaagaggagagcgttgaagacctcaaattgccgggctggctgaacattttccacgacaacatcgtctccacggcgattgtgatgaccatcttctttggtgccattctgctctccttcggtatcgacaccgtgcaggcgatggcaggcaaagtgcactggacggtgtacatcctgcaaactggtttctcctttgcggtggcgatcttcatcatcacgcagggtgtgcgcatgtttgtggcggaactctctgaagcatttaacggcatttcccagcgcctgatcccaggtgcggttctggcgattgactgtgcagctatctatagcttcgcgccgaacgccgtggtctggggctttatgtggggcaccatcggtcagctgattgcggttggcatcctggtcgcctgcggctccagcatcctgattattcctggctttatcccgatgttcttctctaacgccaccatcggcgtgttcgctaaccacttcggcggctggcgtgcggcgctgaagatttgtctggtgatggggatgatcgaaatctttggttgcgtctgggcggtgaaactcaccggtatgagtgcctggatgggcatggcggactggagcattctggcaccgccgatgatgcaaggcttcttctccatcggtatcgcctttatggccgtcatcattgtaattgcactggcttatatgttcttcgctggccgcgcgctgcgcgcagaagaagatgcagaaaaacaactggcagaacagtctgcttaataaggagttttgattatgaccgtacgtattctggctgtgtgtggcaacggacaaggcagttccatgatcatgaagatgaaagtggaccagtttttaacccaaagtaacattgaccatacggtaaacagctgcgcggttggcgagtacaaaagcgagttgagtggcgcggatatcatcatcgcttctacgcacattgcgggcgaaatcaccgtgaccggcaacaaatacgtggttggcgtgcgcaacatgctctctcctgccgactttggcccgaaactgctggaagtgatcaaagagcatttcccgcaggatgtgaagtaaggacgcgccatgaaattacgtgatagcctggcggaaaataaatccatccgcctgcaggctgaagcagagacatggcaggaagcggtgaaaatcggcgttgacctgctggtggcggcagatgtggtagagccgcgttactaccaggcgattctggatggcgttgaacagttcggtccttatttcgttatcgctccgggcctggcaatgccgcacgggcgtccggaagagggcgttaagaaaaccggtttctctctggtaacgctgaaaaagccgctggagttcaaccacgatgacaacgatccggtggatatcctcatcaccatggcggcggtcgatgccaatactcaccaggaagtgggcatcatgcagatcgtcaacctgtttgaagatgaagagaattttgaccgtttacgcgcctgccgtaccgagcaggaagtactggatctcattgaccgcaccaacgcggcagcttaagaaggaattgaacatgagtttaccgatgttgcaagtcgcgctggacaaccagactatggatagcgcctacgaaaccactcgcctgattgccgaagaagtcgacattatcgaagtgggcaccattctgtgcgtgggcgaaggcgtgcgtgcggttcgtgacctgaaagcgctctacccgcacaaaatcgtactggcagacgccaaaattgccgatgcaggcaaaatccttagccgtatgtgcttcgaagccaacgctgactgggtgacggtaatttgctgtgcggatatcaacaccgccaaaggcgcgctggacgtggcaaaagagtttaacggcgacgtgcagatcgaactgaccggttactggacctgggaacaggcgcaacagtggcgcgatgcaggcattgggcaggtggtttatcaccgcagccgtgacgcgcaggccgcaggcgtggcgtggggcgaagcggacatcaccgcgatcaaacgtctttccgatatgggcttcaaagtcaccgtcaccggaggcctggcgctggaagatctgccgctgttcaagggtattccgattcacgtctttatcgcgggccgtagtatccgtgatgccgcttctccggtggaagccgcacgtcagttcaaacgttccatcgctgaactgtggggctaaggagcggatatgttgtccaaacaaatcccgcttggcatctatgaaaaagcgctccccgccggggagtgctggctggaacgcctgcaactggcaaaaacgttaggcttcgattttgtcgaaatgagcgtagatgaaactgacgatcgcctgagccgcctcaactggagccgcgagcagcgtctggcgctggtcaatgcgattgttgaaaccggcgtgcgcgtgccgtccatgtgcctttctgctcatcgtcgtttcccgctgggcagtgaagatgacgcggtgcgggcgcaggggctggagattatgcgtaaagctatccagttcgcccaggatgtcggtattcgcgtgatccagctggcgggctatgacgtttactatcaggaagccaataacgaaacgcgtcgtcgtttccgtgacggcctgaaagagagcgttgagatggcaagccgcgcgcaggtgacgctggcgatggagatcatggattatccgttgatgagctccatcagcaaggcgctgggatacgcgcactatctcaacaatccgtggttccagctctacccggatatcggcaacctgagcgcgtgggacaacgatgtgcagatggagttgcaggccggaatcgggcatatcgtcgcggtacatgtgaaagacaccaaacctggcgtcttcaaaaacgtgccgtttggcgaaggtgtagtggatttcgaacgttgtttcgaaacgctcaaacagagtggctattgcgggccgtacctgattgagatgtggagcgaaacggcggaagacccggcggcagaagtggcgaaagcgcgtgattgggtgaaagcgcgcatggcgaaagcgggcatggtggaggcggcataatgcaaaagctaaaacagcaggtatttgaagccaacatggagctgccgcgctacgggctggtgacctttacctggggcaacgtcagcgctatcgaccgcgaacgcgggctggtggtgatcaagcccagcggcgttgcctacgaaaccatgaaagcggccgatatggtggtggttgatatgagcggcaaggtggtggaaggggagtatcgcccatcttccgacactgcgacgcatctcgaactctaccgtcgttacccgagccttggtggcattgtccatacccactccactcatgccaccgcatgggcgcaggcggggctggcgatcccggcgttaggcaccacgcacgccgactacttctttggcgacattccgtgtacgcgcgggttaagcgaagaagaggtgcagggcgagtatgaactgaacaccggcaaagtgattatcgaaacgctgggcaacgccgagccgctgcatacgccgggaattgtggtgtatcagcacgggccgttcgcctgggggaaagatgctcacgatgcggtgcataacgcggtggtgatggaagaagtggcgaaaatggcgtggattgcccgcggcattaacccacaactcaatcacatcgacagcttcctgatgaataaacacttcatgcgtaaacacggtcctaacgcttattacgggcagaagtaaaacacgcgctgcggaaatttccttcctcgggagataactggtctaattccgcagccgtttttcaaaaaaaagccccctgcgaagggggcaaagcaaactatggcaatgtttcgttggttatacctggtgttagcgataaatatccgcgctggcgtgcatattgccgttactccccggttcccgcatcagaattacgtggtagtacgttgcgccttgcgcatctgtttcttcatttaatgcctgacgtgcttcgctttcagtggcgaaattatgattgatataaatcacgcctaagctttgcacatcgtccatatttctggcctggtggttattaatttcaatggctgcccatgtatttgcacttagcaaaagcacagccagaagggctaaaacacgactgaacatagatacctcctcgacggctgactttgtgtgctctcctctgtgatgatcttctgatttaattttaatcaatgataaagaagttgatggtgaccatttctgatgcagttgttcaaaaaaacaccatgatgaagtgtgatgaacttcaaatcagcgtgttagaggttaattgcgaaaggggagatttatttcggctctgcccttgagtttagcgaggcatacaagtactataacgcgtcatttttcagccgacctttaacacgttccttgcctccccgggattcggctgacccagacaggaggctgaataatccgtaaggagcaattcgatgcgtcattacgaaatcgtttttatggtccatcctgaccagagcgaacaggttccgggcatgatcgagcgctacactgctgccatcactggtgcagaaggcaagatccaccgtctggaagactggggccgccgtcagctggcttacccgatcaacaaactgcacaaagcacactacgttctgatgaatgttgaagctccgcaggaagtgatcgatgagctggaaactaccttccgcttcaacgatgccgttatccgcagcatggttatgcgtaccaagcacgctgttaccgaagcatctccgatggttaaagcgaaagacgagcgccgtgagcgtcgcgatgatttcgcaaacgaaaccgctgatgatgctgaagctggggattctgaagagtaatttctgatgaccaaccgtctggtgttgtccggcaccgtgtgcagggctccccttcgaaaggtcagtccaagtggaattcctcactgccagttcgtgcttgagcatcgttctgtgcaggaggaagccggctttcaccggcaggcgtggtgtcaaatgcccgttattgttagcggacacgaaaaccaggccattactcacagtataacggtcggcagtcgcataaccgttcaggggttcattagttgccacaaggcaaagaacggactgagcaaaatggttttgcatgccgagcagattgaattgatagattctggagactaaccatatggcacgttatttccgtcgtcgcaagttctgccgtttcaccgcggaaggcgttcaagagatcgactataaagatatcgctacgctgaaaaactacatcaccgaaagcggtaagattgtcccaagccgtatcaccggtacccgtgcaaaataccagcgtcagctggctcgcgctatcaaacgcgctcgctacctgtccctgctgccgtacactgatcgccatcagtaatcggtcacggtccattaatacgactttgagaggataaggtaatgcaagttattctgcttgataaagtagcaaacctgggtagcctgggtgatcaggtaaacgttaaagcgggctatgctcgtaacttcctggtaccgcagggtaaagctgttccagctaccaagaaaaacattgaattcttcgaagctcgtcgcgctgaactggaagctaaactggctgaagttctggcagctgctaatgctcgcgctgagaaaatcaatgcactggaaactgttaccatcgcgtctaaagctggcgacgaaggtaaactgttcggttccatcggtactcgcgacatcgctgacgctgtaactgcagctggcgttgaagtggctaagagcgaagttcgtctgccgaacggcgttctgcgtaccactggcgaacacgaagtgagcttccaggttcacagcgaagtattcgcgaaagtgatcgtaaacgtagtagctgaataattcgttattcaacgagacgtaaaaacgccgaccattggtcggcgttttgctttctatttttcgtcaggtattagtttcgcaagtagatccattcaccattctcttgtgtccataagtcaggatggtttgctggcgttagatacatacgagcgcaactgatgtctcgctcctgcggcactcgctcgaaacccaaaccgctgtagattgcggcactactacttaaggaacgcagaccaattttcaaatcatggggtaaatcagaatacgcgtttagcaatgcagcaatgatgaatccgagggcattagaaacgcctgtaacagtgcgaagttggtcgatataaagatcgattgttggtagttcagaactccagcaattaggcatttgggcaggaagggttacaacgtatcctatcgtttggccggtatagtctggagtaccataaccaggtcccaaaaccacttcgtgtattgtgtatttactgttgggttcgaaggattcgacatcttgcaataaatatttcagttctgcggttaacctcgcacccgcgtaagctttattgtatttctgggcgtgaatattatctaatgtagcttcatggttccatccaaaagaattatcaccattcattgtgattccatcgtaagcattacacctcgtcgctaacttattgaatgcttgccagtcactgagatctagtttgtggatctcaacagtacgtctgccatcgcaattatgatctcttccacgattactaagtaatgtagcgcgtgcgtattgatgaaattttaattttactggtttgtcggtggagctaaaacgagataaatatgcaggaaaactataaatagtcgttggtaatgtcattgtaatgttacctgtttaatgtttttataaatatcgcagctgaatgttcacagaaaaaaatcgatattaataaaaataagtttgttttctgaagtggtgaaaatagcggatggtgaaagatattaatatcaaaaatcgctcattatggatataacgatgcacccggggagaaaatgacttccacgccttacaccgtacattcttgttgtgcggtatgtaattattctacgctgtcggtatcggtgtattcgttaatcagcaggttagccagccacaaaaagccattgagaaaattattgattttacatgggattattatattgctaatccttggtttttaaaaattgtgcatagtgaaaatcaaagtaaaggtgtgcattatgcaaaaagtcagcgtctcttagaaattaaccatgcgcacttgcagttaatggaatccttattggatgaagggaagaaacacaatatttttaagccagatatcgacccattgcaggtgaatattaatattgctgcgcttggcggatattatttgatcaaccagcatacgcttggcctggtttatcacatcagtatggttagtccccaggcactggaagccagacgtaaggtcatcaaagagacaatccttagctggcttttggttgaccctagttctaccgcgcacgaataattaccgcgcacgaataaaactgccatccggctggcgggtgaacaggacctgttgattattccccgtatcaatggttaagcccgtcaccacgccgctggcgttctggcggattttcaccatctgcccgttttgcaaattactcagcggcttacccgcgccttctacctgcgccattgcatagacatcggtagcgggcagtccgtggtcgcggaacagctgcgccatcgttttaccgggttcgacacggtaagagcgccattgattatcaattccgctatctggctggaatggttgcgtttgggtagtttgcggctgctcttctggctggccttcctgtataggttctggagcgaccggagccacctgatcaggaccattttgtggggtaactaattgcgcccgcagctgttcttctgtcggcggttgactttggctctgaatatctaactgcgcttcacgcgtcaccaccggcgcgttgggcgtatcatcagatggaagcagaaatccgaccaccaatacaatggcggcaataatgatcccccgacgatgcatcggcggcagcgggtccatgaagcgaaaattgtccggcgcgtgccagactttctccagggttggttttagttcaaagcgcccgggcatggtttcctcctgctccgcgtcttgttcctcaatcatagcctatgaataagctaacgctatgatgtccgtggtaaacccgcctttattatattcatacgggatattgctattgtttctttttccctgggatttgtcatcattcccgcgacaaagttttacccaaagaagtgtggctgatatgctgcccgctactttataccctaagaaaggaaatacgatgaccaccccaacttttgacaccatcgaagcgcaagcaagctacggcattggtttgcaggtagggcaacaactgagtgaatctggcctggaagggctgctgccagaagcactggttgcaggtattgccgatgcgctggaaggcaaacatccggctgttccggttgatgtggtgcatcgcgcgctgcgtgaaatccacgagcgcgccgatgccgttcgtcgtcagcgtttccaggcgatggctgctgaaggtgtgaaatacctggaagaaaacgccaaaaaagaaggtgtgaatagcaccgaatctggcctgcaattccgcgtgatcaaccagggtgaaggcgcaattccggcacgtaccgaccgcgttcgtgttcattacaccggtaaactgatcgacggcaccgtgtttgacagctccgttgctcgtggtgaacccgctgaattcccggttaatggcgtgatccctggctggattgaagcactgactctgatgccggtaggttctaaatgggaactgactatcccgcaggaactggcatatggcgagcgcggcgcaggcgcatccatccctccgttcagcaccctggtgtttgaagtcgaactgctggaaatcctctaagcagcgcattctgttcccctcgaacgagaggggagcaggcattcagcaataaacccttcagtttgccaaacggcgctattttgtgttgcaaagaccccgtaagcgtgtatttttgtgagctgtttcgcgttatcaccgtgatatgacactcactttaaacataaaattaacattagatctaaatcttagtattcatcccgcgtattgttacctaatatcgatgagtcccgatacagattcgtcgtatcatagactgactaaaggccgtagagcctgaacaacacagacaggtacaggaagaaaaaaacatggtagatcaggtaaaagtcgttgccgatgatcaggctccggctgaacagagcctacggcgcaatctcacaaaccgacatattcagcttattgccattggcggtgccattggtacggggttgtttatggggtctggcaaaacgattagccttgccgggccgagcatcattttcgtttatatgatcattggttttatgctctttttcgtgatgcgggcaatgggggaattgctgcttagcaatctggaatacaaatcttttagtgacttcgcttccgatttactcgggccgtgggcaggatatttcaccggctggacttactggttctgctgggttgtaaccggtatggcagacgtggtggcgatcacggcttatgctcagttctggttccccgatctctccgactgggtcgccagcctggcggtgatagtgctgctgctgacgctcaatctcgccaccgtgaaaatgttcggtgagatggagttctggtttgcgatgatcaaaatcgtcgccattgtgagcctgattgtcgtcggcctggtcatggtggcgatgcactttcagagtccgactggtgtggaagcgagtttcgcgcatttgtggaatgacggcggctggttcccgaaaggtttaagtggcttctttgccggattccagatagcggttttcgctttcgtggggattgagctggtaggtacaacagctgcggaaaccaaagatccagagaaaagtctgccacgcgcgattaactccattccgatccgtatcattatgttctacgtcttcgcgctgattgtgattatgtccgtgacgccgtggagtagcgtagtcccggagaaaagcccgtttgttgaactgttcgtgttggtagggctgcctgctgccgcaagcgtgatcaactttgtggtgctgacctctgcggcgtcttccgctaacagcggcgtcttctctaccagccgtatgctgtttggtctggcgcaggaaggtgtggcaccgaaagcgttcgctaaactttctaagcgcgcagtacccgcgaaagggctgacgttcagctgtatctgtctgctcggcggcgtggtgatgttgtatgtgaatcctagtgtgattggcgcgttcacgatgattacaaccgtttccgcgattctgtttatgttcgtctggacgattatcctttgcagctaccttgtgtatcgcaaacagcgtcctcatctacatgagaagagcatctacaagatgccgctcggcaagctgatgtgctgggtatgtatggcgttctttgtgttcgtggtcgtgttgctgacactggaagatgacactcgccaggcgctgctggttaccccgctgtggtttatcgcgctggggttgggctggctgtttattggtaagaagcgggctgctgaactgcggaaataaccgcattatcatgctggatggcgcaatgccatccagcttttagatcactcacccgccagcgcgcgtgggaacagtacattgttttccagactgatgtgatccatcaggtcatcaatcagttcattaatgccgttatacatcgctttccaggtggtgcaggcttctggcggcggtgtgacgttattggtggtgtgtttaatcacttccagcagttcgcccgcttcatcgtgctcgctttccattacgctgattggccccattgcctggctgcccatgccttgtttgatcatcgggaagaggatctgctcttctttcatcatgtggctggaaagctcttcatgcagcatggtcaggtattttgtcagcccttttggcacgctcggtttgtcggcgtgaacgcgctcgactttagtcgcttgcagaatcagctccggcagttgctcgcggtgacgatcgtggtagcgcacgatgatatggtcgatgatttctgccagcggggcgctacgccagtctttctcaatcggttgttcagcgagctttgccagttcagcttcaatgacctcaacatccagttctttacgtgccgccgcgcgcgccagcgtctgcttaccgccacagcagtaatccatatcatatttacgaaacagagcactagcgcgaggaatagagagcgccagttcacctaaaggttggtcgcgataagccatagctgatacctcattcttaataagataagatgtattttaaatgcatctttaaggcaaaagctataacccttacgtagcagaggcttatttaactcactgccagcgtgtcaactttcactgacagattcagttaaaggtttttctggttttgctctgaccgcgatgaccacgccaatcactaacagcgcgataccgctcagcgtcattagcggcggcatttgctggcggagtaaaaaggtgtacagcaaacctgccagcgtttcgaaaacaatcagcggcccgagaatcactgtcggtaatagctggctggcgacgttccagcagagtgcgccaacccaactgcaaagcacggctatcgcaaccatcagactaataaacaccagcggacgggggccaaagggtagggagaagtccggcgtttgcgtattcagccagtaacaagcgacgagatagccgataagactaaccggcagtgtgaccagcgcctgcgctgttgcccacatcatcggatgtttgtcgggattttcccgcagccagcgggcgttgcgcagggcataccacgcccagcagaccacggaaactaacgccagcacgatgccagaggtataacgtgcccagtcaaaatcggggagtccgtggtttaactcagcaatattcacacacgccaggccgatgccaatacaaatcagtgctggggcgagttttccccacgcgagtttgccgtcgcgctggctataaagcagattggcaaagacaggaatgaccaccggcagggtgccgataatcatcgtggaaacaggcgcgccagtacgttgaatggcactggcaaggcagaagtaatagatgaggttgcccatcatagtgagcatcaaggcggtaagccagtcgcgacgcgccaactgacgcagacgcacgcgtcccagccaggcaatgggcagcgcaattaaccctaacgccagataacgccccatgctctgcaacatcgccgggtattccggcacgatcaacggcccgacaaaaataagcccccacatcaaccctgctaacagggcgtacagcacgccgctaatcattactggcatccattgatctgtcagaagaaagttcaggaagcagacatgattgctcccggcatcccgtcattatcagagaggatgcgggaggatgccactttaattaattagttattaacattaaaaagatggcttacgctttcggctaacgttgtcgttgggtggccaatcaatttgctaagtgttttgctgtcatcaaacagaccgcctttgcttgcgccaacgtcagaatccgccagcatatccgccagtccgtcgggcagtccgacgcttttcagtgccgcggcgaaatcggcttcgctcagattttgataggtaacctgtttgccgctctgtttggtcagctctgccgctaactgtgtcaacgtccaggcactatcgcccgccagttcgtaaaccttgccttcgtgaccggcttcgctaatcacgcgtgccgcagctgccgcataatctgcccgcgttgcactggcgattttgccatcgcccgccgcaccgataaatacgccgtgttccagtgctgccggggcgctggcgaggtagttttcgctgtaccagccgttgcgcagcagggtgtaaacgatgccagaatcagccagcattttctccgtctcgatgtgctcatcggcgaggccgagcggggaggtatctgcatgtagcaggctggtataagcgataaatttcacgccagccgcctttgcggcattaataacattacgatgctgcggggcacgttgacccacttcgctggaagagatcagcagtagtttttccactccctgaagtgcagatgtcagtgcggcttcatcgccgtagtcagcctgacgcacggtaatgccttgtgctgccagggcttgggcttttgccggattacgaacgatagccactatttggctggcaggaaccgttttcatcaaggattcaataacatagtgaccaagttggccagtggcaccagtaatagcgatcatgggaagtctccatcgttttgtcttgtgtttaaatacgctaacacctaaacttacttttagtaagtacgtacaaaaaggtaagtatgaaatgagtcaggttagcctgagccaacaactgaaagagggtaatctctttgcggaacagtgcccgagccgcgaggtgttgaaacacgtcaccagccgttggggggtgttgattctggtggcgctacgcgaaggtactcatcgctttagcgacctgcggcgcaaaatcggtggggtgagtgaaaagatgcttgcgcagagcttacaggcgttagaacaggatggttttcttaaccgtatcgcgtatccggtggtgccgccgcatgtggaatatagcctcacgccgctgggcgagcaggtgagcgaaaaggttgctgcactggcggactggattgagttgaatttgcccgaggtgttggcggtgcgggatgaacgtgcggcataactgccggatgcgctgagcttatctggtctacggtgcatggcttgtagggcggataagatgcgccagcatcgcatccgccaataaatgccggatgcggttgatgatttataggccgaaaaagaagtgttttacttactcaaatccacctgataaatcgcaaacccgatatcatcggtcgcgactttattcatcggatactgccctttctctttaataaacgctgcggctttatcactcggagaggtttcgaaacggatatccagtttcttatcgccagctatcggtgctaaacgccagttgttatctgccgccgggtgaatttcccccgcacgtttgctctcatcagcaatccacgctgccagcacgctgcggttctcatccggactagcaaaagcgatatggctgtcgcccgtaccggcaaatttgccgccgtaagcgcgatagttattggtggcaaccaggaacatggcgttcggatcaatcggcttgccattaaaggtcaggttcttaatcctttccgcattggcattaatcatctggcactcgccgtcataacgggcgggctgggtaacatcaatctgataattcacaccatcaataacatcaaagttataagtgcggaaaccatcccagttgatgagactctgtggtttcgtgctgttgggatcaatctggttaaactgtcccgcggagcactccagccactctttcacctctttaccgctggctttcaccacaatcagcgtattgggatagagataaagatcggcggcattacggaaggtcaactggcctttttccacctccacatagcttgccgggtcatttttgcgaccaccgactttaaacggtgcggcagcactaagcaccggcagttttgccagatccggatcgccctgaatgtaatgctcgacatacgctttttgcgcgttgttcaccacctgcacggtcggatcgtcctgcaccagcgccagatagctatacatattgtcggcagatttaccgattggcttgctgacgaactggcgtgtggcatcgtgatcggctttgagtgtttctaccagcttgctgtcttccgccgcgagggattttttattagcgatgtcgtaaatcggtcgtgcttccgctttcgcctgcgtcacctgccatttaccgctgtcattactgagttgtaagtcgaccacaccaagatgatcgccccacatgcctggcattaccgccggaacaccattcagcgtgcctttggcgatatcagccccttcgatatcagcaaaatctttacctgggaaaacggcgtgagcatggccaaacataatggcgttaacgcccggaatttcactgaggtaataaacactgttttccgccatcactttatacggatcggcagatagcccggaatgtgccagaacgacaacaacatcggcacctttctcgcgcatttcaggcacgtatttgcgcacggtttcggtaatatcattcaccgtcactttcccggataaattagctttatcccagcccatgatttgtggtggcacgacgccaatatagccaatcttcagcgtctgtttttttccgtctttatcgaccacttcggtgtctttaattaaatacggtgtaaacattggctgtttggttctggcgtcaatgacgttggcatttacataagggaatttcgctcctgccagcgcatttttcaggtaatccagaccgtagttaaactcgtggttgccaagcgttccgacggtatagtccagcgtatttaatgccttatagaccgggtgaatatcacctgcttttaatcctttcgcgctcatgtaatcggccagcggactcccctgaatcaaatcgccgttatcaaccagtacgctgtttttcacttcattgcgggcatcgttaatcaggcttgccgtacgtaccagtccgaatttttccgtggcggtgtctttgtaataatcgaaatccatcatgttgctatgcagatcagtggtttccatgatacgcagatcgaccgtcgctgcattcacactggcggcaatcagcgtggccaggagcgttgcgctaaacttaatcatcagggacatccttttatcatcgggaatacgaaagaaaagggagaataaacgtcttacttatagaacagtgaagaatgccacaattttacgctttgaaaatgatgacactatcacagttggcgcattcattaacgatagggtataagtaaaacaataagttaacaccgctcacagagacgaggtggagaaatgttagatcaagtatgccagcttgcacggaatgcaggcgatgccattatgcaggtctacgacgggacgaaaccgatggacgtcgtcagcaaagcggacaattctccggtaacggcagcggatattgccgctcacaccgttatcatggacggtttacgtacgctgacaccggatgttccggtcctttctgaagaagatcctcccggttgggaagtccgtcagcactggcagcgttactggctggtagacccgctggatggtactaaagagtttattaaacgtaatggcgaattcaccgttaacattgcgctcattgaccatggcaaaccgattttaggcgtggtgtatgcgccggtaatgaacgtaatgtacagcgcggcagaaggcaaagcgtggaaagaagagtgcggtgtgcgcaagcagattcaggtccgcgatgcgcgcccgccgctggtggtgatcagccgttcccatgcggatgcggagctgaaagagtatctgcaacagcttggcgaacatcagaccacgtccatcggctctagcctgaaattctgcctggtggcggaaggacaggcgcagctgtacccgcgcttcggaccaacgaatatttgggacaccgccgctggacatgctgtagctgcagctgccggagcgcacgttcacgactggcagggtaaaccgctggattacactccgcgtgagagcttcctgaatccggggttcagagtgtctatttactaaattcagatggcagaaacagtgtatttcctgattctgccatcctgatttctcccaacctaaaaagttataaataaaaagagattgtatttaaagtgcaaaaattcaattgctaataagttacattttaataatgagcgttttttgatagtttacttctatagtgagatatttaatggcgacataaagtaaccaaataaaataaggttgtcatatgttacccaggatcagacacaataattttattggtgcggtggagttatttgtaaagtctagctatacaaaaacacatagtaacaatttttttaacaacatccatcatgcatttaagaaaaaagattggattagcaattatgatagcctgttaactttgagggagttctttcgttgcgcaactcagattgataaaagtggttatcaggtgcttagtagtaaaaatgaaactgttcacgccatggataagtttcttatcagtttcagccttaaagataacggtgccgaatatacaatgacattgcgaggtagtggatttgaatacgaagaaatacccataacaataaatgaatataacagtttcatggatttcaaaaaccgtgaatttccgttagaacaaaacagacgattgtatgcccgggatattctacagaaaaaacagtctgacataccgaaaaggattaaaggttatattcaccaggcgattggtgacgtgtctttaggttatgccttattggaggatatagtaagcaaattaaaacggggtaaatttgaactccaaataccaggaggtggaattaaagaatgcgatggatggtatatttacgaaaaaataattgatgataattttgccatagtcatagaatctttgggctttgcgcttaaaatctatggaggggatgaacgttttcgtaatggttcctctgttgttttggaggatgaagattactctcttatttataattttctggttaatgcaggttgccaacaagtcgaattagccgaacaagtggatgcgatagtaagtgcgaatctggccgcagatagcgatattaccaaagaaaagatttgcgagaaatataaaagcaccattgaggcgtttaaaaaagagcaactagcgttaccagtattagttcggcgtaagaacagtgagacttaattcccctatcccatagataacgataggggaaaattatttttgcagaatttatgttattgccattatttgagcaacttttgcagcaggtccatcacttgctgcacctcttccggtgtgagcgccccgtctttggcccattgcacgcgaccatccttatccagcaccactacagcggaactttcttcatccagctgccaggcaccgagcgcgacgccattgctatcgacaataaactggctccagggataaagctttttattactctccagactgctgcgcacaaacatcccactacccggaatcgcgtcgtcggtgttaacaatggtggtggtctggtaacgatcgtgcggtaacttcgcacttttaatcgcttcaatcagcgtcgcgtttttctcttttgcagaggtgcgaccagcaatatgttgcagtactcgcacttttcccactaactgcgcgctgttccaggttttgtagctaaactgatctttatcaagcaccaactcgccccgatcggtaatgccaatcggcggcactcgctgaccggtttcgaactgatgtgcggaagccatcatcggcaacagcaggcaggtgagtgccagaatcttgcgtagggtcatggtgtttccttcttatgatatgcaggtgatccgaccacttgggtctgagttttaatcatatgtgctatttatcgaatttcccgcaagtgtgatgccagtttgcggtcaagcgcacaaatcatatgaaaaatgaatgcttatactgaagaccgcgcttcggtaaaaagataattctgaataattgtaacctttaggtaaaaaaagttatacgcggtggaaacattgcccggatagtctatagtcactaagcattaaaatttgcgcctcataatagttgggccgattgtggcaccgcacaggcgtaatactcagcaggagataacaatgaaaattttccaacggtacaacccacttcaggtggcgaagtacgtaaagatcctgttccgtggacggttatacatcaaggacgttggcgcttttgaattcgataagggtaagattcttatcccaaaagtgaaggataagctgcatttgagtgtgatgtccgaagttaaccgtcaggttatgcgtctgcaaacagagatggcttaaccaaagtgctatgcagtaaaaagtgctatgcagtaataagacggctcctgattcaggagccgttgatgtttctgggggttacgcgacgctttcttctttatctttagcgtcaggcagttttgggctaagggcggtggccttgctgtcgatccgggtcaccagcagctggtcgatgcggtagttatcgatatccaccacttcaaatttgtagccggcgaatttcacgctatcggtgcgtttcgggatcttacgcagcataaacatcataaagccgccgatggtttcgtagttgccgctctgcgggaactcgtcaatatccagcacgcgcatgacgtcgtcaattggggtgccgccgtcaatcagccaactgttctcatcacgggcgacaatctgctcttccagcccctgaccgaccagatcgcccatcagcgtggtcatcacgtcattgagggtgatgatccccaccaccagcgcgtactcgttcatgatcaccgcgaagtcttcacctgcggttttaaaactttccaacgcctcactaagggttaacgtatccggcacaatcagcgtgttgcgaatttgtacgccgctgttcagtgccaggctttggttagccagcacgcggttcagcaggtctttagaatcgacataaccgatgatgtggtcaatatcttcattacagacgaggaacttagagtgcggatgttccgccaccttattcttcaggctttgctcatcttcgtggagatcaaaccaaatcacgttttcacgcggtgtcatactagacggaacggtacgggattccagctcaaagacgttttcaatcagctcgtgttcctgtttacgtaacacgcccgccagcgcaccggcttccactaccgcgtagatgtcatcagaagtgatgtcatctttacgtaccattggcagtttgaaaatacggaagattatgttcgccaggccgttgaagaaccacaccagcggggtgcaaacgtacaggcagaagcgcatcgggttgatgatacgcaaagccacagcttctggcgcaatcataccgatgcgtttcggggttaaatccgcaaacaggataaacatgccagtcactaagctgaaagagagaataaagctcagttgctcagagagctctgcgctcatatagcgggagaacaggctgtgaaaagctggagaaaatgccgcatcaccgacgataccgccgagaatcgccactgcgttcagaccgatttggaccacggtaaagaacatgccgggattttcctgcatattcagaacgcgttgggcatttatattgccttcatcagccagcagtttaagtttgattttgcgactggcggcaaggctgatctcggacatgctgaagaacgcacttacagcgatcaagcagagtatgactaaaatactgtttaacatatcttatccgacctttcaggccagatcctcggaaggggaagttgattaatttgtgtgaaatacacattgaaagccgattcgaagaaagtgaaccggcattttcagtggctagtatagcgtaaggtactgtaaagccgccagagggttaaaattcagacagctgaaaaatgcaaaactgcctgatacgctatgccgatcaggcctacgcagtccttgcaatatattgaatttggacgattttgtaggcctggtaagtcgtttacgccgcatcaggcatagacaaagagcactttatcaacaaactacatttgtacccgtaacgttatgcttccggcggcagacagacgccaattccgccaattccacagtaaccatacgggtttttatgcagatattgctggtggtcatcttcggcataataaaacggtgtggcgttagcgatttccgtggtgatgtgacgatcgtcatcggcggcaagcatcgccgcctgaaaacgttccagactggcgcgagctgcggcatcctgttctggggtcagcggataaatcgcactacgatactgcgtgccgtggtcattgccctgacgcattccctgggcgggatcgtgattctcccaaaatacctgtagcaactgctcatagctgatgacggaaggatcgtaaacaatgcgtaccgcttcggcatgacccgtatcaccggagcacacttcccgataagtcggatttggcgtatagccgccggtatagcctgcggcggtgctgtaaacgccgggtaactgccagaacagacgctccacaccccagaaacaacccatcgcaaaaatggcaatctccattccgtcaggtacattggtcatactgtgaccgttgaccgcatgcagcgtggctacgggcatcggggtgttacgtccaggcagggcatcggcgggggaaaccagatgctttttatcaaataaactcatggtgtcgctctcccgaaaatcggtcattggggttaaggttgtaacaagaggcgtatttgcacacaataaccaccgtgaataggtctaaagtaaaacataagaaatatttggggtttagtctgctttttaatccatattactggatttttgttaagccgtttaacggcgttccaggggcaggaaaaaaggatattcaggagaaaatgtgcgctatatccgacagttatgctgtgtaagcttactctgcttaagcggatctgccgtcgccgcgaacgtccgtctacaggtcgaggggttaagcggacagctggaaaagaacgttcgtgcgcagctttctacgattgaaagtgatgaagtgacgccagaccgtcgctttcgcgcacgcgtcgatgatgccatccgcgaaggtctgaaagcgctgggttattaccagccgaccattgaatttgatctccgtccaccgccaaagaaagggcggcaggtattgatcgccaaagtcacgccaggcgtgccggtgttaattggcggcaccgatgtggtattgcgcggcggcgcgcggaccgataaagactatttgaaattgctcgatactcgcccggctattggcacggtactgaaccagggcgattatgaaaatttcaaaaagtccttaaccagcattgcgttgcgtaaaggttatttcgatagcgaatttaccaaagcgcagctgggcattgcgctcggcctgcataaagccttctgggatattgattataacagtggcgaacgttaccgctttgggcatgtgacctttgaaggaagtcaaatccgcgatgaatacctgcaaaatctggtgccgtttaaagagggcgatgagtacgaaagcaaagatctggcagaactgaaccgccgactttctgctaccggctggtttaacagcgtggtggtggctccacaatttgataaagcgcgcgaaacgaaagtattaccattgacgggcgtggttagcccgcgaacagaaaacaccatcgaaaccggggtcggttactctacggacgtgggaccgcgcgtgaaagcgacgtggaaaaagccgtggatgaactcttatggtcacagtctgaccaccagtactagtatttccgcgccggaacagaccctcgacttcagctataaaatgccgctgctgaagaatccactggaacaatattatttggtgcagggcggttttaagcgcactgacctgaacgataccgaatctgactccactacgctggtggcttctcgctactgggatctctccagcggctggcagcgtgccattaacctgcgctggagtctcgaccactttactcagggtgaaattaccaataccacgatgctgttttatcctggggtgatgattagccgcacgcgttctcgtggtggcctgatgccaacctggggcgacagccaacgctactctatcgactactccaacacggcctggggtagtgatgtcgatttctccgttttccaggcgcagaacgtctggatccgcacactgtacgatcgccatcgttttgttacacgcggcacgctgggctggattgaaaccggtgatttcgacaaagtaccgccggatctgcgtttcttcgccgggggcgaccgcagtattcgtggctacaaatacaaatctatcgctccgaaatacgccaacggtgacctgaaaggggccagcaagttgataaccggaagcctggaataccagtacaacgtgaccggaaaatggtggggcgcggtgtttgtcgatagtggcgaagcggtaagcgatattcgccgcagcgactttaaaaccggtaccggggtcggcgtgcgctgggaaagcccggtcgggccaatcaaactcgattttgccgtaccggtcgcggataaagacgaacacgggttacagttttacatcggtctggggccagaattatgagtttatggaaaaaaatcagcctcggcgtggttatcgttatcttactgttgctgggaagcgtggcgtttctggtgggcaccaccagcggcctgcatctggtatttaaagcggcggatcgctgggtgccaggactggatattggcaaggtcaccggcggctggcgcgatctcaccttgtctgacgttcgttatgagcagccaggcgtggcggtaaaagcgggcaatctgcatctggctgtcgggcttgagtgcctgtggaacagcagtgtttgtattaatgatctggcgctgaaagacattcaggtcaacatcgacagtaaaaaaatgcctccttctgaacaggttgaagaagaggaagatagcggtccgctggatctctccacgccgtatcccatcaccctgacacgggtggcactggacaacgtcaacattaagattgatgacaccacggtaagcgtgatggacttcacctccggcctgaactggcaggagaaaaccctgaccctgaaaccgacgagcctgaaaggcctgctgattgctctgccgaaagtggcggaagtggcgcaggaagaagtggtcgaaccgaaaattgaaaatccgcagccggatgaaaagccgctcggcgaaacgctgaaagatctcttttctcgcccggtattgccggaaatgaccgacgtgcatttgccgcttaacctgaacattgaagagtttaagggcgagcagctgcgcgtgacgggcgacacggacatcaccgtgagcaccatgctgctgaaagtgagcagcattgacggcaatactaaactggacgccctggatatcgattccagtcaagggatcgtcaacgccagcggcacggcgcagctgagtgacaactggccggtggacatcactctcaacagtacactgaacgtggagccgttgaaaggtgaaaaagtgaagctgaaaatgggcggcgcgctgcgcgaacagctggagattggcgttaatctttccggtccggtggatatggatttacgcgcccagacgcgactggcggaagccggattgccgctcaacgtggaagtgaacagcaaacagctttactggccgttcactggtgagaagcagtatcaggcggatgatctgaaactgaaacttaccggcaaaatgaccgattacacgctctctatgcgtacggcagtgaagggacaggagatcccgcccgcgactattaccctcgacgccaaaggtaatgaacagcaggtcaatctcgacaaactcaccgtcgcggcgctggaagggaaaactgaactcaaggcgttgctcgactggcaacaggccattagttggcgcggtgagctaacgcttaacggcattaacaccgccaaagagttcccggactggccgagcaaactcaatggcttgattaaaacccgcggtagcctgtacggcggcacctggcagatggacgtgccggagttgaagctgaccggtaacgttaaacagaacaaagtgaacgttgacggcacgctgaaaggcaacagttatatgcagtggatgatcccagggcttcatctggaactcgggccaaacagtgccgaagtgaaaggcgagctgggggtaaaagatctcaatcttgatgccaccatcaacgcgccggggctggataacgcgctgccggggcttggcggtacagcgaaagggctggtgaaagtacgcggcacggtggaagcgccacaactactggcagatatcaccgcgcgcggcctgcgctggcaggaactttccgtggcgcaggttcgcgtggaaggcgatatcaaatccaccgatcagatcgccgggaaactcgacgtacgcgttgagcaaattagccagccggatgtaaatatcaacctcgtcaccctgaatgccaaaggcagcgaaaagcagcacgagctacagttgcggattcagggggagcctgtctccgggcagcttaatctggcaggaagttttgatcgcaaagaagaacgctggaagggaactcttagcaatacccgcttccagacgccggttggcccgtggagcctgacccgcgatattgcgctggattaccgcaataaggagcaaaaaatcagcatcgggccacactgctggcttaacccgaatgcggaactgtgcgtgccgcaaactatcgatgcgggggccgaagggcgtgcggtggtgaatctcaaccgcttcgacctcgccatgctgaaaccgtttatgccagaaaccactcaggccagcggtatcttcacgggtaaagcggacgttgcctgggacaccacgaaagaggggctgccgcagggcagtatcacccttagcgggcgtaacgtgcaggtaacgcaaaccgtcaacgatgcggcgctgcccgtggcgtttcagacactgaatctgacggcggaattgcgtaacaaccgtgccgaattgggctggaccatccgcctgaccaataacggccagtttgatggacaggtgcaggtgaccgatccgcaaggccgccgtaatcttggtggcaacgtcaatatccgtaacttcaaccttgcgatgataaaccccatctttacccgtggggaaaaagcagcggggatggtgagtgccaacttgcgtctgggtggtgatgtgcaaagcccgcagttgtttggtcagcttcaggttacgggtgtggatatcgatggcaactttatgccgtttgatatgcaaccgagccagcttgcggtcaactttaacggtatgcgcagcacgcttgccggtacagtacggacccagcagggtgaaatctacctgaacggtgatgccgactggagccaaattgaaaactggcgggcgcgggtaacggcgaaaggcagtaaagtgcggatcaccgtgccgccgatggtacgaatggatgtaagcccagatgttgtattcgaggctacaccaaacctgtttaccctcgatggtcgcgtggatgtcccttgggcgcgcatcgtggtgcacgatctgccggaaagcgcagtaggcgtctccagcgatgtggtgatgcttaacgataacctgcaaccggaagagccgaaaacggcgagcattccgattaacagtaacctgattgtccacgttggcaacaatgtgcgcattgacgcctttggcctgaaagcgcggctgacgggcgatctcaatgtcgttcaggacaaacaagggctgggtctgaacgggcagatcaacatccctgaagggcgcttccatgcctatggtcaggatctgattgtgcgtaaaggtgagttactgttctctggtccgccagatcaaccgtatcttaatattgaagctattcgtaacccggatgctacagaagacgacgtaatcgccggagttcgcgtcactggtctggcggacgaaccgaaagcggagatcttctctgacccggcgatgagccaacaagctgccttgtcttatttgctacgtggacaagggctggagagcgatcagagcgacagtgcggcaatgaccagcatgctgattggtttgggggttgcgcaaagtggccagattgtgggtaaaatcggcgagacgtttggcgtaagcaatttagcgctcgacacccagggagtaggcgactcctcccaggtagtggtcagcggctatgtattgccaggtctgcaagtgaaatacggcgtgggtatatttgactctatagcaacactcacgttacgttatcgcctgatgcctaagctatatctggaagccgtgtctggtgtagaccaggcactggatttgctctatcagttcgagttttaacaatgcgaatatttgtctacggcagtttacgccacaaacaaggcaacagtcactggatgaccaatgcccagttactgggcgatttcagtatcgataactaccagttgtatagcctgggccactatccaggcgcagttccggggaacggaacggtacacggtgaagtttatcgtattgacaacgccacgctggccgaacttgatgccttgcgcaccaggggcggtgaatacgcgcgccagttgattcagacgccgtacgggagtgcatggatgtacgtttatcaacgacccgtcgatggattaaagctaattgaaagcggcgactggttagacagggataagtaaccatatgcatacgccaccttcgggtggcgttgttttttgcgagacgactcgcattctgttttgtaattccctcaccttttgcttttctctccgagccgctttccatatctattaacgcataaaaaactctgctggcattcacaaatgcgcaggggtaaaacgtttcctgtagcaccgtgagttatactttgtataacttaaggaggtgcagatgcgtattaccataaaaagatgggggaacagtgcaggtatggtcattcccaatatcgtaatgaaagaacttaacttacagccggggcagagcgtggaggcgcaagtgagcaacaatcaactgattctgacacccatctccaggcgctacagccttgatgaactgctggcacagtgtgacatgaacgccgcggaacttagcgagcaggatgtctggggtaaatccacccctgcgggtgacgaaatatggtaaagaaaagtgaatttgaacggggagacattgtgctggttggctttgatccagcaagcggccatgaacagcaaggtgctggtcgacctgcgcttgtgctctccgttcaagcctttaatcaactgggaatgacgctggtggcccccattacgcagggcggaaattttgcccgttatgccggatttagcgttcctttacattgcgaagaaggcgatgtgcacggcgtggtgctggtgaatcaggtgcggatgatggatctacacgcccggctggcaaagcgtattggtctggctgcggatgaggtggtggaagaggcgttattacgcttgcaggcggtggtggaataaggtgtgtttatttatcgcgggcataaaaaaacccttactaaccgaagcccggcgttcagggttattacgccagaagaacttatttattctttgcgcgctcgaaggaggcaacgatttcagctttagcggcttctgcgttttcccaaccttcaactttcacccacttgcctttttcgaggtctttgtagtgctcgaagaagtgagcgatttgcgctttcagcagttcaggcagatcgttaacgtctttaatgtgatcgtattctttgctcagcttgctgtgcggaaccgcaaccagtttcgcatcttcaccggcttcgtcggtcattttcagaacgccaaccggacggcaacggatcacagaacccggctgcagcgggtacggagttgggaccagtacgtcaaccgggtcaccgtccagagacagggtgtggttgatgtaaccgtagttgcatggatagaacatcgcggtggacatgaagcggtcaacgaacagtgcgccgctctctttgtcgatttcgtatttgatcggatctgcgttagccgggatctcaataacaacgtagatgtcttccggcagatctttacccgcagggacgttgagtaagctcatgtctgtttcctttaaaaatatgtggcaaacaagtgccgagtattatagccaactcgcgccgaatgtcttcgcttgttttcgtcttcattttcctttttcaccagttttaagacggtatacagagcaggaaaatccataaccgtagccgcatttttcatagtgagatgaaagcgattacaaacttgtgattaacgttttatttacttttttgaagtgtgatgtaacgcaatctgttacataacgaattgtctatagttttttcgcgaacatcttttaaccaataataactaccccgacgaggacaaccctatgtggaaacgcttacttatagtctctgcagtcagcgcagccatgagctctatggcgttggccgctccattaaccgttggatttagccaggtcggaagcgaaagtggctggcgtgccgcagaaaccaatgtggcgaaaagtgaagccgaaaagcgcggaatcacgttgaaaattgccgatggtcagcaaaagcaggaaaaccagattaaagcggtacgttccttcgttgcacaaggggtggatgcgatctttatcgctccggtggtcgcgacaggttgggaaccggtattaaaagaggcgaaagatgccgaaatcccggtattcttgctcgatcgttccattgatgtgaaagacaaatctctctatatgaccaccgtcactgccgacaacatcctcgaaggcaagttgattggtgactggctggtaaaagaagtgaatggcaaaccatgcaacgtggtggagctgcagggcaccgttggggccagcgtcgccattgaccgtaagaaaggctttgccgaagccattaagaatgcgccaaatatcaaaatcatccgcagccagagtggtgacttcacccgcagtaaaggcaaagaagtcatggagagctttatcaaagcggaaaacaacggcaaaaacatctgcatggtttacgcccataacgacgacatggtgattggtgcaattcaggcaattaaagaagcgggcctgaaaccgggcaaagatatcctcacgggttccattgacggtgtaccggacatctacaaagcgatgatggatggcgaagcgaacgccagtgttgaactgacgccgaatatggcaggtcccgccttcgacgcgctggagaaatacaaaaaagacggcaccatgcctgaaaagctgacgttaaccaaatccaccctttacctgcctgataccgcaaaagaagaattagagaagaagaaaaatatggggtattgagggttgctatgcctgatgccgattcgtaggccggataaggcgctcgcgccgcatccggcgatggtgcactgaagcctgatgcgacgcttaccgcgtcttatcatgcctactgggagcacgctttacaccgggggaaaccatgacgaccgaccaacaccaggagatcctccgcaccgaaggattaagtaaatttttccccggcgtcaaagcgttagacaacgttgatttcagcctgcgccgtggcgaaatcatggcgctgctcggtgaaaacggggcgggaaaaagtacgctaatcaaagcattaactggtgtataccacgccgatcgcggcaccatctggctggaaggccaggctatcagtccgaaaaataccgcccacgcgcaacaactcggcattggcaccgtctatcaggaagtcaacctgctacccaatatgagcgtcgctgataatctatttataggccgcgaacccaaacgcttcggccttctacgccgcaaagagatggaaaagcgcgccaccgaactgatggcatcttacggtttctccctcgacgtgcgcgaaccgctcaaccgctttagtgtcgcgatgcagcaaatcgtcgctatttgtcgggctatcgatctctctgccaaagtgctgatcctcgatgaacccaccgccagtctcgacacccaggaagtggagttactgtttgacctgatgcgtcagttgcgcgatcgcggcgtcagcctgatttttgtcactcactttctcgatcaggtctatcaggtcagcgatcggatcaccgtcttacgcaacggcagtttcgtaggctgtcgggaaacgtgcgagctaccgcagatcgaactggtaaaaatgatgctggggcgcgagctggatacccacgcgctacagcgtgccgggcgaacattgttgagcgacaaacccgttgccgcgttcaaaaattacggcaaaaaaggaacgatcgcaccgtttgatctcgaagtacgccccggcgagatcgtcggtctggctggattgctgggaagtggacgtaccgaaaccgccgaagtgatcttcggtatcaaacctgctgacagcggcacggcgttgatcaaaggcaaaccgcaaaacctgcgaagcccacatcaggctagcgtactgggcattggcttctgcccggaagacaggaaaaccgatggcatcatcgctgccgccagcgtgcgggaaaatatcatcctcgctctccaggcccagcgcggctggctacgtcccatttcccgcaaagaacagcaagagattgccgaacgctttatccgccagcttggcattcgcacacctagtactgaacaaccgattgaatttctctccggcggcaatcagcaaaaagtgttgcttagtcgttggctactgacccgaccgcaatttctgatcctcgatgagccaacccgcggcattgatgttggtgcccacgccgagatcatccgcctgattgaaacgctatgcgccgatggtctggcgctgctggtgatctcctccgaactggaagagctggtgggctatgccgatcgggtgattatcatgcgcgatcgcaaacaggtggcggagatcccgctggcagagctttccgttccggcgatcatgaacgccattgcggcgtaaggagaacagtgtgatgcctcaatctcttccggacaccactacgccaaaaaggcgctttcgctggccgacggggatgccgcagctggtagcactattgctggtgctgctggtcgatagcctggtagccccgcatttctggcaggtggtgcttcaggatgggcgtttgttcggtagccccatagacattcttaaccgtgcagctcccgttgcgttactggcgattggcatgacgctggtgatcgccaccggtgggattgatctctccgtaggggcggtgatggctatcgccggagccacaacggctgcgatgacggtcgcgggattcagcctgccgattgttttgttaagcgccctgggcaccggcatcctggcgggattgtggaacggcatactggtagcgatcctcaaaattcagccgtttgtcgccactctgatcctgatggtcgccgggcgcggcgtggcgcaactgatcaccgccgggcagatcgtcacgtttaacagcccggatctcagttggttcggcagtggaagcctgttgttcctgccaacgccggtcattatcgcggtgctgacgcttatcctgttctggctgttgacccgcaaaacggcgctggggatgtttatcgaagccgttggtatcaacattcgggcggcaaaaaatgccggggtaaacacgcgaatcatcgtcatgctcacttatgtgttgagcgggctgtgtgcggcgattgcgggcattatcgtggcggcggatattcgcggtgccgatgccaacaacgctgggttatggctggagctggacgccattctcgcggtggtgattggcggcggaagcctgatgggcgggcgctttaacctgctacttagcgtggtgggggcgctgattattcaggggatgaacaccggaattttgcttagcggctttccgccagagatgaaccaggtggtgaaagcggtggtggtgctttgcgtgctgattgttcagagccaacgctttatcagtctgattaaaggagtacgtagccgtgataaaacgtaatttgccactgatgatcaccatcggcgtctttgtgttgggttatctttactgcctgacccagtttcccggttttgcttccacaagagtgatctgcaatatcctgaccgataatgcctttcttgggatcattgccgttggcatgacctttgtgatcctcagtggtgggatcgatctctccgtcggtagcgtgatcgcctttactggcgtgtttctggcaaaagtgattggcgatttcggcctcagcccgctgctggcgtttccgctagtgctggtgatgggctgtgccttcggcgcatttatggggcttctgatcgacgccctgaagatcccggcatttatcattacgcttgcggggatgttctttttgcgcggcgtcagctatctcgttagcgaagagagcattccgataaaccatcccatttatgacacgctcagtagccttgcgtggaaaatccctggcggcggtcgcttaagtgcgatgggactgctgatgttggcggtggtggttatcggcatattcctcgcgcatcgtacccgttttggtaatcaggtatacgccattggcggcaacgcaacgagcgcgaatctgatggggatttccactcgcagcaccactattcgcatttatatgctctccaccggactggcaacgctggcggggattgtcttcagcatttatacccaggccggatatgcgctggcgggcgtaggtgtggaactggatgctatcgccagtgtggtaattggcggtacgcttttgagcggtggcgttggaacggtattagggacgctttttggcgtggcgattcagggactgattcagacttacataaactttgatggcacgctgagttcctggtggacgaaaatcgccatcggtattttgttgtttatttttatagcattacagcgtggattaacggtgctgtgggagaatcgtcagagtagcccagtgacaagagtcaacattgcgcagcaataaaaacgcctctccgtgtggagaggcgcaggagattacgcgtccgggaactcacggataaagcgttcgacatcttcaaccatatggtcgttgccgacaaagaaactacggcgctggtgcagggtttccgggatgatatccagaatacgctctttgccatcgctcgctttaccgcccgcttgttccgccaggaatgccatcgggttgcactcatacagcaaacgcagtttgccgtccgggtggctggcggtgcttgggtagagataaataccgcctttcagcaggttacggtggaaatccgcgaccagactaccgatataacgactggtataagggcggttggtggatttatcttcttcctggcagaatttaatgtacttcttcaccccgttcggaaacttaatgtagtttccttcgttgatggagtaggttttgcctttctccgggaagcgcatccgttcctggcacaggcagaaaacgccgaggctaggatcgtaagtaaaggcgtgaacaccgcatccggtggtgtaaaccagcatggtagaggagccgtataccacgtaacctgccgcaacctgtttgttaccaggctggaggaaatcttcttccgttaccggcgtgccaacaggcgtaacgcggcggtagatggagaaaatggtaccgacagagacgttaacatcgatgttggagctgccatccagggggtccatcagcaccacgtattttgcgtgttcacagccttcaaagacgacaatctcatcttcttcttcagaggcaatgcccgcaacgatatcgcgtgctttcagtgcggctttcagtttttcattagcgaacaagtcgagtttctgctgaacctcgccctgcacgttctcagcaccgctggcacccaggatatcaaccagtcctgctttgttgatatcgcgatggataatcttggcgcccagttttattgcgctcagcaaagcagtgagctcaccggtagcatgagaaaactcgtgctgcttttcgacaataaattcacctaacgttttcataaaactttccctgcaatgtttatggagtaaagcgaccgcaacaatcttaacaaataatctcaatgttgcgctcaggtgaatcgcgccagcaaattacggattatcctgaaatgcgtttctcacttgcccgacatatgcgtaaaatgagcggcagattaaaaaaggatagtgacgtatgcgcattcatattttaggaatttgtggcacatttatgggcggtctggcgatgctggcgcgccagttaggccatgaagtaacgggtagcgacgccaatgtgtatccgccgatgagcaccttacttgagaagcaaggcattgagctgattcaggggtacgatgccagccagctcgagccgcagccggatctggtgattattggcaacgccatgacccgtggaaatccgtgtgtggaagcggtactggaaaaaaatatcccttatatgagtggtccacagtggctgcacgattttgtgctgcgcgaccgctgggtgctggccgttgccggtacacacggcaaaaccaccaccgcgggaatggcgacctggattctggaacagtgtggttacaaaccgggctttgtaatcggcggtgtgccggggaactttgaggttagcgctcatctgggcgaaagcgacttctttgttatcgaagcggatgagtatgactgcgccttcttcgacaaacgctctaaatttgttcattactgcccgcgtacgctgatcctcaacaaccttgagttcgatcacgccgatatctttgacgacctgaaagcgatccagaaacagttccaccatctggtgcgtatcgttccggggcagggccgtattatctggccggaaaatgacatcaacctgaaacagaccatggcgatgggctgctggagcgagcaggagctggtgggtgagcagggtcactggcaggcgaaaaagctgaccaccgatgcttccgaatgggaagttttgctggatggcgaaaaagtgggcgaagtgaaatggagcctggtaggcgaacataatatgcacaatggcctgatggcgattgcagcggctcgccatgttggtgtagcgccggcagatgccgctaacgcgctgggtagctttattaatgctcgtcgccgtctggagttgcgtggtgaagcgaatggcgtcacggtatatgacgattttgcccatcacccgacggcgattctggcaacgctggcggcgctgcgtggcaaagttggtggtacggcgcgcattattgctgtgctggagccgcgcagcaataccatgaaaatggggatctgcaaagacgatctggcacctagtttaggtcgtgccgatgaagtcttcctgctgcaaccggcgcatattccgtggcaggtggcagaagtggcagaagcctgcgttcagcctgcacactggagtggcgatgtggatacgctggcagatatggtggtgaaaaccgctcagcctggcgaccatattctggtgatgagcaacggcggttttggtgggatccatcagaaactgctggatgggctggcgaagaaggcggaagccgcgcagtaattcggccttagccagatatagtatgcgtaggccggataaggcgttcacgccgcatccggcatttgagcatagtgcctgatgcgacgcttgatgcgtcttatcaggcctacaggtgcaccgtatccggcaaaccatactcacatcaacaacgaaaattacccttcgttctccgctaactcgcgcagatactggaaaatctggcgtgcggatttcggcggcttattcccttctttctctttcttcgcgttgcggatcagagtacgcagttgctgacgatcggcatcgggccacagatttaatacctcagcgatggcgtcatcaccttgatcgatcagacgatcgcgcaggttttccagtttatggaacagcaccacctgctggttgtgacggtttttcagcttatccagcgcctgacgaataggctctacgtcgcgctggcgcagcatcttaccgatgagctgcaactggcggcggcgaccttccatcttaatacgctgggcgagctcaatagccgcgcgcagatccgcatctaacgggatcttatccagcgcgtttttccccagatcaacaatttccgcgccaaggcgttttagctcctcggcatcacgtttaatttcacttttactgacccagataatttcatcgtcttcgtcttcgatgtcatcaccgggaacgtcgtcgagccagtcttcgggctgcttagtcatctcaggctccttaaaaaaagaggctaatgttaccagttaagatgcgcactgaaaaacggttctctgttagacttcagagaaactctctacattatggcacttgcaatgaaagtaatctctcaagttgaagcgcagcgcaagattctggaagaagcagtttccactgcgctggagttggccagtggcaaaagcgacggtgcggaagttgccgtcagcaagaccaccggcattagcgtaagcacgcgttatggtgaagtggagaatgttgaattcaatagcgatggcgcgctggggatcactgtttatcaccagaaccgcaaaggtagcgcaagttccaccgatttaagcccgcaggccattgcccgtactgtacaggcggcgctggatattgcccgttataccagcccagatccctgtgccggcgtggcagacaaagagctgctggcctttgacgcaccagatctcgacttgttccaccctgcggaagtttccccggatgaagccattgaactggcggcccgcgcagaacaggcggcattgcaggcggacaaacgcatcaccaataccgaaggtggcagctttaacagccactacggtgtcaaagtttttggcaacagccacggcatgttgcagggttactgcagtacgcgtcatagcctctccagctgtgtaattgccgaagaaaatggcgatatggagcgtgattacgcctacaccattggtcgtgcgatgagcgatctgcaaacgccagagtgggttggggccgactgtgctcgccgtactttaagccgtctgagtccgcgtaaactctccaccatgaaagcgccagtcatttttgccaatgaagtggcaaccgggctttttgggcatctggtgggggcgatagcgggtggaagcgtttatcgtaaatctaccttcctgctggatagcctgggtaaacaaattctgccggactggctgaccattgaagagcatccgcatctgctgaaagggctggcgagcacgccattcgacagcgaaggtgtgcgcaccgagcgtcgcgatattattaaagatggcatcctgactcagtggctgctgaccagctacagcgcgcggaaactggggctgaaaagcaccggacatgcgggcggtattcacaactggcggattgccggacaaggtctaagcttcgagcagatgctcaaagagatgggcaccgggctggtggtgacggaattgatgggccagggcgtgagtgccattaccggtgattattcccgtggtgcagcgggcttctgggtagagaatggcgaaattcagtatccggtgagcgaaatcaccatcgcaggtaatttaaaagatatgtggcgcaatattgtcaccgtcggtaacgatattgaaacacgcagtaatatacagtgtggttctgtgctgttgccggagatgaaaatcgccggacagtaaaaaaactggcgcgacctgccgcgctataaactaaaaaattacacaaaatcattcgcactgcatcgagacggaaagtgaatgagggccggggagcgtactcgcagtacgtgacccggtcgaatgagcgtagtcgtcgatgaggcagtgtgaaggatgaagtgtaaataaaaaaggaactattcttgcagtctcctcgttggtattcagttcggcgtcatttgctgctgatctcgaagacaatatggaaaccctcaacgacaatttaaaagtggtcgaaaaagccgataacgcggcgcaagtcaaagacgcgttaacgaagatgcgcgccgcagcgctggatgcgcaaaaagcaacgccgccgaagctcgaagataaaagtccggacagcccggaaatgaaagatttccgccacggtttcgacattctggtcggtcagattgacgacgcgctgaagctggcaaatgaaggtaaagtaaaagaagcgcaggctgctgcagagcaactgaaaacgacccgcaatagttatcacaagaagtatcgttaattcctcatttccctgttgcctgcactcaggtaacagggaacttatcatcgcaaatgatgcaccacctgattgctgctgccgcgccagatcagggaagggtcttttaaatcctgcacaaatttgccgtcgaccagcacgttaatcaaatcaacaacctgcatttgcgcagcgttgagttcgtcgagtttatagcctgtccacacccagatgtctttacccggacactcggcgcggatgcgttgtaccagtttcagaatatccggcacgttttgcggatgcagcggatcgccgccggagagggaaataccctggcgtttgatacgagtgtcattcagatcgttaatgatctggtcttccattgctttggtaaatggctgaccggaatttacccgccatgtgcttttgttatagcaaccggggcattcatgaacacacccggagacaaacagggtgcaacgagtgccggggccgttgacgatgtcgacaggatagtactgatgataattcattatttcgcctggcttatcagtccgcgtgtaggctgcatccggtaatcaatgcctgatgcgacgctgtcgcgtcttatcagacctggagcaattgccaaatgtaggccggataaggcgtttacgccgcatccggcatttgcttagctcagagtgaagattaacctatctgcccattccccaaatgtttaacgcggcgcttaacttcttcctgcttaccagcgttaaacggacgtgcatccgggctacctaaatatccgcacacgcggcgagttacgctcacacgggaggcgtcatggttaccacatttcgggcaagtgaagcctttgctggtgcactcgaactcaccggtaaagccacactcgtagcactcatcaatcggtgtattggtgccgtaatacggtacatgctgatagctgtaatcccagacatcttccagcgccttcaggttgtgctgaatgtttggatactcgccgtagcaaatgaaaccaccgttcgccagcggcgggtaaggcgcttcaaagtcgatcttgtcgtacgggttcaccttcttctccacatcgaggtggaaactgttggtgtagtaacctttatcggtcacgcccggcaccacgccaaactcagcagtatcgagacggcagaagcgatcgcacaggttttcactcggcgtgctgtagagactgaaaccataacccgtttcttctttccactgatccactgcctgacgcagacgttcaacaatggcgatacctttcgcgcgaagctgctcgttgtcgtaaacatgctcgccgccgaacagcgcgttaatggtttcgtggatgccgatgtaacccaggctaatagacgcacgaccgtttttgaagatttcagaaacatcatcgtcagcattgagacgcacgccacaagcaccttccatatagaggatcggggccacgcgcgctttcacgccttcgagacgagcgatacgggtcatcagcgccttacgtgccagcaccagacgttcatccagcagcttccagaaggtggcttcatcgccttttgcttccagagcaatacgcggcaggttcaggctgatcacgccgaggttgttacgaccatcgtggatctgctcgccgttttcattttcccacacgccgaggaagctgcggcagcccatcggagttttaaagctaccggtgactttcactacctgatcgtagttcaggatatccggatacatgcgcttgcttgcgcactccagcgccagctgtttgatgtcgtagttcggatcgccttttttatggttcaggccatcgcgaatcgcaaacaccagtttcgggaacaccgcagttttacggtttttaccgaggcctgcgatacggttacgcaggatgctttcctgaatcaggcggctttcccagctggtgcccaggccaaaaccaaaggttacaaacggcgtctgaccgttggcggtgtgcagggtgtttacttcgtactccagactctggaaggcatcgtagcactctttgatggttcgagagttagcgtagccttcggcgtccgggatgttccactcttctgcggtcttgcgatgtttgttgtagctggcagtgacaaacggtgccagcacttcatcgatacggttaatggtggtgccgccataaatatggctggcaacctgagcaataatctgcgcagttaccgcggttgccgtagagatgctcttcggcggttcaatctcggcgttccccattttaaagccctgggtcagcatgcctttcaggtcgatcaacatgcagttgaacatcgggaagaacggactgtaatcgagatcgtgatagtgaatatcgccacgctcatgtgcctgcaccacgtcacgcggcagcaggtgctgacgtgcatagtgtttagccacgatcccggccagcaggtcgcgctgggttggaatcaccttgctgtctttgttggcgttttcgttgagtaagctggcgttggtctgctcgaccagaccacggatctcctggttcaggcgaccgcgtttttcacgttcaatgtcgcgatcgtgacggtactcgatgtaagcacgagccagttgtttgtatggaccactcatcagctgattttcaactgcggtctggatctcattgatatccacctggttgcggccctgcatctgctcgctgacaaccgcggcaacagtggcgcaataatcggcatcatcgacttccgctgctttagctgcacgcagaatcgcttctttgatgcgctcacttttaaacggcactttgcagccgtctcgtttcatcacatgcggtgtcatgatcgctccatatttttaagaacaggttatccacagaaattgggaaaggcgttttccggttttttcgtttcgttttccggtgctttccgcaatcgccatccgcttatccacaacgccgcacctttttcgtggggagctgtagtagcaattatagtcgattaatacaacatattgggttgggacgcattttaaagtctatatatagtgctttgcatcaaggatgtttgagctttttttgatgtagctcaaagtaaaaagcagagcgtacggatgacgggcgctacagcgatatgtaaattttttaatgaatttgctggttgaaaaatcaacaaaaacaacatactgacagacaaaaccccggaatgaccggcattaccggggcttagggaagatttacttctgtaaccaccagacagcctcaaaaggccgtaaattcatggcacagggttgtggactggcttcttcgtagttatgcatcacaagctgccagttgccgcgcatttgccctgcctgccagggttggatctcacggctaaggttggcaatgaccagcaaggtttgccccttccattcacggcgatagcaccacaatacagggctgtttggcagcagatcctggtaattgccccatgtcaggatggcttcctgcttacgcagtgcgattaacttttggtaggtgtaaaacacgctggaatcatcggccagcgcggcttctacgttgatttgttgatagttatcgcccaggccaatccacggttcgccagccgtaaacccggcattatcgccgttgctccattgcatgggcgtgcgactgttgtcacgggatttactggcgaggattgccaataactcgtcggcatcacgcccatcgttgcgcagctcggcaaacatattgaggctctctacgtcgcgatagtcagtaatgcgcgtgaaatgcgggttggtcatgccaatctcttcgccctggtagatatacggcgttccctgcatgccatgcagcaccatcgccagcatttttgccgcaggcacgcggtattcaccttcatcaccaaagcgagaaacaatgcgcggctgatcgtggttacaccagaacaaggcattccatgctacgttgtgcattccttgttgccagtggcggaacaatgttttcaacgccacaaagtcaggtttagccagcgtccatttttcaccaccgggataatcgaccttcaggtgatgaaaattaaaggtcatgctcaattcactgcctgtcagagccgcgtatcgctggcaatgctcaaggctggtggaggacatttcacctacggtcattaacccgcgtggcgtaaacacatcgcggttcatctcgtgcaaaaactcgtgtgctcgtggcccgtcggtgtagaagcgacgcccgtcgccgtccaggtcttcagggaaacgcgggtctttggagatcagattcaccacatccaggcgcaacccgtcgaccccacgatcggcccagaactcacagacttttttcagctctgcgcgtaccgctggattctcccagttgagatccgcctgttctggtgcaaagagatgcaaatagtactgttcgctttccgcatgccagcgccacgcactaccgccaaatttactacgccagttgttcggtggcgtttctggttctccatcgcgccagatataaaactggcggtaagggctttctttgttcagcgcctcgcgaaaccaggcatgttgggtagaggtatggttaaacaccatatcgagaatgatacgaatcccgcggctttttgcctgcgtcaccagttcgtcaaaatcgtccagcgtgccgtaggtgggatcaatcgccgtatagttcgctacgtcgtaaccgttatcgacctggggagagacataaaagggggttagccagatggcatcaacgcccagtttatgcagatagtccaggtgttggataacgccacgtaaatcgccggtaccgctacccgtggtgtcctgaaaactctttggataaatctggtagataacgccgttttgccaccagtggggaagatgagtcattacgttattcctgcgaatgcgagggggcgcaattgcgccccgaagaaaattaaacaatgtccagcgtgcccaggcggtatttccgctgatagataaagctggtgagtacaatcgggatgatgatggcgatagccattgccagcgcaaacacctgccagtagctcggttgaatgctgagaattcccggcaggccgcctacgccgatgccattcgccataacgccgttcaggccgcatagcaatcctgccagaccagaaccaatcatcgcgcacagcatcgggaagcgatatttcaggttgatgccgtacattgcaggctcagtgaccccaagccaggcggagatagcggcaggcacggagatctcgcgttcattgtgcttgcggctggaaatgataatgcctatcacggcggagccctgagcgatattgctcagcgcaatcagcggccacactggcgtaccacccatgctttgaatcatctgcaaatcaatagcaagcgtggtctggtgtacaccggtgatcaccagcggggcgtacaggaagccaaacaatgctgcgccaatcggagcaaagctgccggtcatcaggtgacgtaccgcaaaggcaacgccatcgccaatcatgcgaccaaacggaccaatcagcgcatgggcgaggaacaccgcgaggatcaggctacagacgggtaccaccaccagatagaggtaatccggcacgatgcgtttaaggcgagtttcaataacgcccagcgccagtccggctaacagtgccgggatcacctgcgcctgatagcctactttggcgatgctgaacatgccaaagtcccacacttccggcagctgctgcccgagcagataagcgttcatcagctgtggagaaaccagtgtcacgccaagcacgataccaaggatcggcgtgccgcccatttttttcaccgcactccagcaaataccgaccggcaggtagaagaagatcgcttcaccgatcaaccacagaaaatcgtagatcgtttgcagggaagggtacatttgcgccagcgtctgaccgttgctcatgggcaaatcgccgatcacattgcgaaaaccgaggatcaaaccgccgctaatcaacgcgggcagcaacgggaagaagatcaccgcgaaatgagagatcaactgctcatgccatttcatattatgccgggcggctttttttacctgctctttatcaacctgcgcctgtccggtactcgcaatcagtgcttgatagtaatcacccacgttggtgccaatcaccacctgaaattgcccggcattggtgaaacagcctttcaccatagggagttgctcaatttctttcggtctggcattggccggttggttgaggacaaagcgtaggcgagtaatacagtggctcaccgtcgcaatattgccgcgcccgccgaccagttcaatcaaccgatcgatatccgtttggtttattttgctcatcataaagccccatggcagatgacatttttggttggctgcagaatatattgcgcggaaaaatttaaaaacgggaacgttcccgaaacgcagcgaagatcacaatttatcgttcaggaaacgatcaggacagggtggcggggatgatgatttgttgcggttcgctgcgcccggttacctgcgcgatcaactggcaagccgcctggcgtccagcttcggcgtaaccgggatctacggttacgatctccggatggaggaatttcattaacggcgtattaccgacgctcgccagttgcaaggtgtcgatgcgttgctcttgcaggtatttacttgcgccaagtgccagcgtgtcggttgcgcacagtaaggcggtagtttcaggcgtaatcacttttgcaacgttctcatagccttgcttcatagcaagccctggcagggcggcaacgggatgcagtttatgcgctttgcagaacgccaggtaggcttcgtgacgtcgcttaccggttgtcacgtcactgtgcggcacgccgagataactgatattacgatgcccctggtcatacagccgttgcatcaggattttgattgccccttcgtcgtcataacagacgctagcaaagccttttgcgtcacgcgccagcagaaccaggctactctgccagtgggctaacatttcttctgttatgccagtaaaaccgaacagcactacgccgtcgatattacgccgtttcagcactcccaaatgttcggcaactaattgcggggaaaactgactttccatcatgattgggtcgtaaccttgttcatagaacgctggcagcatggtttgaacggcgagattttcactcaagctatccagacgggtaacaatgatggcgaccactttatcgctttgcccacgcatagcgcgcgcagagcgggaaggggaaaatccatgctgattcatcactgcttcaacacgctcgcgggtgagctggctcacgccgctttcgttattcagcacccgggaaactgtagatttccccacgccgcttaagcgcgcgatatctttgatggtcagccgattttgcatcctgttgtcctgtaacgtgttgtttaattatttgagcctaacgttacccgtgcattcagcaatgggtaaagtctggtttatcgttggtttagttgtcagcaggtattatatcgccatagatgctacgaatattattggattctccttattatttgcggcgcttttttcacttaccggaggttatatggaacctgatcccacgcctctccctcgacggagattaaaacttttccggtaagcccgtcttttcacggcgttaccggatgcgtaaggccgtgacgttttaacgtccctgctcagctttattaccttcaggtaaggcttcgccacgcctgaagacatttctgtactgtttcagacagtgcggagggactccttatgtttaaagaaatttttacccggctcattcgccatttaccttcccgtctggttcatcgtgatccattgcctggcgcgcagcagacagtgaatacggtggtcccgccgtccttaagtgcgcattgcctgaaaatggcggtgatgcccgaagaagaattgtggaaaacgttcgacacccatccggaagggttaaatcaggcggaagtggaatctgcccgcgaacaacatggtgaaaataaattacccgcacaacaaccgagcccgtggtgggtacatttatgggtctgctatcgcaacccctttaatattttactcaccattctcggcgctatttcttacgccacggaagatttatttgctgcgggcgttatcgcgctaatggtcgctatttctacgttgctgaactttattcaggaagcacgttccactaaagcggcagatgccctgaaagcgatggtcagcaatactgcgacggtgctgcgcgtaattaacgacaaaggcgaaaatggctggctggagatcccgatcgaccagctggtgcccggcgatattataaaactggcggcgggagatatgatcccggcagatttacgtatcttgcaggcgcgggatctgttcgtcgctcaggcgagcttaaccggtgagtctctgcccgtagaaaaagccgctaccactcgccagccggagcacagcaatccgctggagtgcgacacgctgtgttttatgggcaccaccgtggtgagcggcacggcacaagcaatggtgattgctacaggtgccaatacctggtttggtcaactggcggggcgtgttagtgagcaggaaagcgagccgaatgcctttcagcaagggatcagccgcgtcagtatgctgctgattcgctttatgctggtgatggcaccggtggtgctgttaatcaatggttacaccaaaggcgactggtgggaagcggcgctgtttgcgcttagcgtcgcggtaggcctaacgccggaaatgttgccgatgattgttaccagcacgctggcgcgcggcgcagtaaagctgagcaaacagaaagtgatcgtcaaacatctggatgctattcagaactttggcgcaatggatattctgtgcactgataaaaccggcaccctgacgcaggataaaattgtgctggagaatcataccgatatctccggtaaaaccagcgaacgcgtgctgcatagcgcgtggttgaacagtcattatcagaccggacttaaaaacctgctcgatacagcggtgctcgaaggtacggatgaagagagtgcgcgcagcctggccagtcgttggcaaaaaattgatgagattccgtttgatttcgagcgtcgccggatgagcgtggtagtggcagaaaataccgagcaccatcagctggtttgcaaaggtgcattgcaggaaatcctcaatgtgtgtagccaggtgcgtcacaatggcgagattgtgccgctcgatgacatcatgctgcgtaagattaagcgggttactgatacgctgaatcgtcaggggctgcgcgtggttgcggtggcgacgaaatacctgccagcgcgtgaaggagattaccagcgggcggatgaatccgacctgatcctcgaaggatatattgcttttcttgatccgccaaaagagacaaccgctccggcactgaaggcattaaaagcgagtggaattaccgtaaaaatccttactggcgacagtgagttagttgcagcgaaagtgtgccatgaagtggggctggacgcgggagaggtggtcattggtagtgatattgaaacgctatctgacgacgaactggcaaatcttgcacagcgtaccacgctgtttgcccgcctgacgccgatgcataaagaacgcattgtgaccttactgaagcgcgaagggcatgtggttggctttatgggcgatggtattaatgatgcgcccgccttacgcgctgcggatatcggcatttctgtggacggcgcggtagatattgcccgtgaagcggctgatatcatcctgctggaaaaaagcctgatggtgctggaagagggggttattgagggacgtcgcactttcgccaacatgctgaaatacatcaaaatgacggcgagctctaacttcggtaatgtgttcagcgtgctggtagcgagtgctttcttgcccttcctgccgatgttgccgttacacttgcttattcagaacctgctgtacgatgtgagtcaggtggcgatcccgtttgataacgtcgacgacgagcaaattcaaaagccgcagcgttggaatccggcggatctggggcgctttatgatcttcttcggaccgatcagcagcatcttcgatattttgacgttttgcctgatgtggtgggtattccatgccaacacgccggaaacgcaaacgctgttccagagcggatggtttgtggtgggcttactgagccaaacgctgattgtgcatatgatccgcacccgccgtgtgccgtttattcagagctgtgcaagctggccgttaatgatcatgaccgtgatcgtgatgattgtcgggatcgcattgccgtttagtccgctggccagttatctgcaattacaggcgctgccgttaagctatttcccgtggctggttgcgattctggcagggtatatgacattaacccagttggtgaaagggttctatagccgtcgttacggctggcaataaagaataaactgggcacgatagccccgattcagattgtagacaaagtgagttttgttcatgccggatgcggcgtaaatgccttatccggccaacaaattcaataaattgcaggaatcacgtaggcctgataagcgtagcgcatcaggcgattttgcgtttgtcatcagacttaatccgggcatgatagcccggatttccatcaagattagcgacgaacagcgatcgcttcgatctcaatcttcacgtctttcggcagacgggcaacttcaacgcaagaacgtgccgggaaggtggcgttgtgttcggtgaagaaggcttcgtaagtggcgtttacggttgcgaagtcgttcagatcttttacaaacacggtagttttaacgatgtcgcccactttcaggccagcggcttcgacgatcgcttttacgttatccaggctctgacgtgcctgtgcagcgacgtctgccggtacttcgcccgttttcggatttaccgggatctgaccggaggtgatgatcatattgcccagatcaacgccctgtacgtaaggaccgatagctgccggtgcattttccgtcgcgatagttttgctcatgatttctcctttattacagcggtaaaaagtctggctcattatagggagccagacttttattaccaaccgcaattaattggccagcaccacattatgggaaaactctttttcacagtatttgcatttgagcgcgatatcattggcgcgttttcgcacggcaaagctggaactaaccggttcggcatggctgatacagttgctgttcgggcagaccagcacattgtcgatgcgctccggcagacttgggcggcttttacccaccacttcatagttgtcgatacggttaaccgtggcttgcggcgcatacaatgccagttgatctacttgatcttcactcaaaaaggtattttcgattttgatcagatctttgcggcccatctcgccagaaggcaggttcagaccaatggtgatgcgctgatccgtttcggtcagcttgaacagactcaacagcttaaaaccgatctgggcggggatatggtcaattaccgtgccgcgtttaatagcttcaacctgcaatttattatcgtgtgtcatctctatttccccttacagtaccagatcgcgattcagaaccagtgccagtaacgcctggcgagcgaaaatcccgttgcctgcctgctggaagtaccaggcgtgtggcgttttatcaacatccgtcgcaatctcatcaacacgcggcagcggatgcagcactttcatattggctttggcgttgtggagatcgctggcgcgaagaacaaactgcgctttcacgttggcgtactcggacgggtccagacgctctttttgcacgcgggtcatgtacaggatgtctacttccgccatcacttcttcaatagagctgtgcagactccatgcgatccctttttcatcgagcatatccagaatgtattgcggcattgccagcgcgtccggcgcgatgaagtaaaaacggttgccgtcgaacttcgctaacgcctgagtcagggagtgaacggtgcggccatatttcaggtcaccaaccattgcgacgtggagattgtccagacgcccctgggtttcctgaatagtgaataagtccagcaaggtttgcgtcggatgttggttggagccatcaccggcattcagtaccggtacattgccggaaaactcggtggccaggcgcgccgcaccttcctgcggatgacgcatcactatcgcatcgacgtaagtgctgataacgctaatggtatcggccagcgtttcgccctttttacccagacttgtattggcgctgtcggagaagcccaccacgctggcccccaggcggtgcatagatgtttcgaaagagaggcgggtacgggtagaggcttcgaagaaacagctggcaatgactttgtgcttcaacagctctggttgcgggtttgctttcagtttcgccgctgtcgccagcaccagattaaggtcatcgcgactaaggtcgtttatggaaatgatatgtttctgatatagcggattagccatcttttatctcctgacgcctgggcaaaaaaaagcccctcgattgaggggctgggaatgggtgatcaacgggaagaaaaacggcaggccagcgtcttttttcagacgcggtaagacaaaatgtcgaacacactgaaccatacatcctcccggcaaattgtccggcattatactcatcgtcagaagcggcgcaagcatttgatgcaatattttgtcagcgcaaacggtttatttgaattaaaagtcaaggtatatgcatttttatttgatgtgattctgcaggggaactgtccttcggtatcaataattgcagacattccctgctttttcctttttcactttcacgcaatcagatatgcattttattccattcatccgacttatagggcggagtgtgaaagcgaacggctaacactattgcttactgctcagggatgcgcgctatcactttaatttcaaaatcaaagcctgccagccatgtaacacccaccgccgtccagtttggataaggtggggcgctaaatatttcatttttcaccgtcatgatgtcttcaaattggttttctggatcggtatggaagctcgtaacatcaatgatatcgtcaaaagtgcatcccgcagctgccagggtcgcatgcaaattatcaaatgccagtctgacttgttgctgaaaatcgggttctggtgttccgtcctctcgacttcctacttgcccggaaacaaacagcaaatcgccggaacgaatagccgcagaataacgatgctcagcatatagactatgtcggccagcagggaaaacagcggttctttctaccatttggttatcctcaagatttacgacatgaacagaagatttctctttaccgggagccgcttttagcggacgacgtgagtaaacaaaacccagacatcatggataatggctgggcttaattgagcgtagtcggttatgcgccaaacgcgccatcaatggtatgcatcgcgccggtaacaaaactggcttctggccctgctaaccatgcgaccataccagcgacctcttccggttgcccatgtcttttgatagccatcaaactatgcaacatatcgcgcattggcccgttggcgggattagcgtcggtatcaattggccctggctggacgacgttaatggtgatcccacgcggtccaaaatcacgggccagcccgcgcgccatgccttgcagggcagatttgctggcggcataagcagccatgcctgcaacaggcatacgatcgccattcacggagccgatgattaagatgcgcccgccttcgggcatctgccgggcggcttcaacagaggcatgataaggagcatgaatattgattttgaaaaggcgatcaatatcgtcggcatttaattccagggcctcgccaaagacgccaatacctgcatttaccaccaggatatccaatgcgccgctcttacgaacgacatcaatgacagcgtctctgtcagcactatctgtgaatactgctgtcgctccagtctcttgtgccaggcgtttagcggcatctttgctccccgcataggtgaatcgtacattggccccatcggtgacgaaacgacgtacgatagcggcaccgataccacgactgccaccgaggatgagaactgtcttacctgtaaaagcgcccataaggactccttgatttattatgtaacatgcattacaaaactgttttaactttctgtcaacaggttttgtaatggtcactaaaaaacaatctcgcgttccaggtcgtcccagacgtttcgctcctgagcaggcaatctctgcggcaaaagtgctttttcaccaaaaaggtttcgatgctgtcagtgttgctgaagttactgattatcttggtattaaccccccgagcctctacgcggcttttggcagtaaagctgggttatttagccgtgtactcaatgaatacgtcggtacggaagctattccgcttgccgatattcttcgtgatgatcgtccggtaggcgagtgcctggttgaggtattaaaagaagcggcgcgcagatatagccaaaacggcggctgcgctggctgtatggttcttgaaggtattcatagtcatgatccacaagcgcgtgatattgccgttcaatattatcacgccgcagaaacgaccatttatgactacatcgccaggcggcatccacaacgcgcacaatgtgtgactgattttatgagtaccgtgatgtctgggctttctgcgaaggcacgagaggggcactctatagaacaactctgtgcaacagctgcaatggcgggggaagcgataaaaactattcttgaggagtgatgcgggccttgacccgaaaggcgggaaagcgcctgccgataagttgtgataagacaataattcacgcgttaaggctagcggaattgattatcttttcgtataacgatagaaatgaaacgttgttttaattaaggagtggaaaagatgatcatcggaaatattcataatcttcagccgtggctaccccaggagttacgccaggcgattgagcatatcaaagcacacgttacggcagaaacgccaaagggcaagcacgatatcgaaggcaatcgactgttttatcttatcagcgaagatatgaccgagccgtacgaagctcgccgtgcggagtaccatgcccgctatcttgacattcagattgtgttaaaaggtcaggaaggcatgaccttcagcacgcaacctgcaggcgcgccggataccgactggttagctgataaagacatcgcatttttgccggaaggcgttgatgagaaaacagttattctaaatgaaggtgattttgttgtgttttatccgggggaagtgcataaaccgctgtgcgcagtgggcgcgccagcccaggttcgcaaagcagtagtgaagatgctgatggcgtgatgacttttcgccgtaaataactcaaggtttacggcgagtttgtgaaaagagcgttttttgatatttttttgtgagtaaaatttgtaatgcttagacgttcttattcactcaaggagttcgtcatgagcaaaataagtgatttaaattattctcaacacattacattagccgacaattttaaacaaaaaagtgaagttttaaatacctggcgtgttggaatgaatgattttgcccgtattgccggggggcaggataacagaaggaatattctttctcctggagcatttttagagtttttggcaaagatatttaccctgggttatgtggattttagcaaacgctccaacgaagcgggtagaaatatgatggctcatattaagtccagttcttattctaaagatactaatggcaatgaaaaaatgaagttttacatgaataatcctgtaggggaacgagcggatagtcccaaggtgattatagaaattagtctttccactatcactactatggggactcgtcaaggacatacagccattatatttccacaacctgatggtagcactaaccgttatgaagggaagtcctttgaaagaaaagatgagagtagtttacacctgattactaacaaggttctggcgtgttaccaaagtgaagctaacaagaaaatagcgcgtctattaaataataatcaggagttaaataatctacagaaattaaataatctacagaagttaaataatctactgaagttaaataatatacaggggttaaataatcctcaggagttaaataatccgcagaatttaaatgattctcaggagttaaataacagccaggaattaaatagtccacaggagttaaatgatccgcaggagttaaataattctcaggacttaaataactctaaggtgagttgtacagttagtgttgattctacgattacgggtttattaaaagaaccattgaataatgcattattagcaataaggaacgaacatctgctattaatgcctcatgtatgtgatgaaagcattagttacttactgggcgaaaaaggtatacttgaagaaatagataagctctacgcattaaatgatcacggaattgataatgacaaagtaggtaacaatgaaattaatgacatcaaagttaacctgtctcatattcttattgattccttagatgatgcaaaggttaaccttacaccggtcatcgatagcattctggagacttttagtaaatccccatatattaatgatgtaagaatactggattggtgttttaataaaagcatgcaatattttgatgatactaaaaagataaagcatgcatgctccgtaataaatcatattaatcttcgcagcgatcagtctaaaatagctgagacattatttttcaatctcgataaagaaccctataaaaatagccctgaattacaggggttgatttggaataagttggttgtatatgtcaatgaatttaacttaagtaatcgagaaaaaacaaatttaatacaaaggctatttgataatgttgagtctatatttaatgaagtacctgtcagcattttagtgaatgatatttttatgaatgatttctttatgaaaaatcctgagatgattaattggtacttccctcagttacttaagagttatgagggtgaaaagatttattttgataatttaaaatatgatttaaatgataatgataaggaatctaataaagaaattttgaagaatcaaccagataatgttatcaaagaaaaactgaataatgaatacaaacttagatttagaatgatgcaaactatcttgcaaagcagagttaatgtattaccatatattaatgaacagcgtttaaataaactaaatccaccggaaaatttacgtatagcaatagaacactttgggtggaagaatagacctatcactgcataaaataatgtgatgccgggatggtttgtatttcccggcatctttatagcgatagcaattatttactgagcgtcgcgaccatcaccgctttgatagtatgcatacggttttccgcctgatcaaaaacaatgctggcggcagattcgaagacctcatcagtgacttccataccgccatgtaggccaaattcttccgccattttcttgccaagcgtcgtttggtcgtcatgaaacgcgggcaggcagtggaggaatttgacctccgggttaccggtcaactgcatcatcttgctgttcacctgatattcacgcagcaatgcaatccgttccgcccatttctcttttgcttcccccatgctcacccacacatcggtatagataaagtcagcaccttcaactcccttcgcgacatcttcagtcagcgtaatattcccaccattttgctgtgccagggcgcggcattccgtaaccagcgcagcttccggccagcacgcttgtggcgcgaccagacgcaaatccagaccggtaagcgccgcagcttcgagcatgctattgcccatgttgttacgcgcgtcacctgcatagaccagcgtcatttcgttgaacgctttgccgggcaaatgctcctgcatggtgagaagatccgccagcagctgcgtgggatggaactcattggtcaggccattccataccggcacgctagcgtattccgccagtgtttcgacaatctcctgaccatagccgcgatactgaataccgtcatacatgcgaccaagcacgcgggcagtgtctttaatgctctctttatgaccaatctggctgccgcttgggccgagataagtaacgcgagcaccctggtcatatgcggcaacttcgaaagagcatcgggtacgagtgctgtctttttcgaagatgagcgcgatgtttttaccagtgagtttggcttcttctttaccgcttttcttatcggctttcagcttcgcggctaactgcagcaggctgttgagttcagctggcgtgaaatcgagtaatttcaggaaatgcttatgataaaacccggacatagatccctcctgtggctaacgcctcaatgaattaaaattcaatttatatggatgattattcatttgcaagtctaaagcataaatctttgtcacaaaggtggaggcaatgtcagtggtgtgtgacaataagagtatcggcaggacattaagaggaatgagccatggcaaacccggaacaactggaagaacagcgtgaagaaacacgtttgattattgaagaattactggaagatggcagcgatccggacgcgctgtacaccatcgaacaccatctttccgcagacgatctggaaaccctggaaaaagcagcagttgaagcgtttaaactcggttacgaagtgaccgatccagaagagctggaagttgaagatggtgatatcgtgatttgctgcgacatcctcagcgagtgcgcgttgaatgccgatctgatcgatgcccaggttgaacaactgatgacgctggcagagaaatttgacgttgagtacgacggatggggcacttactttgaagatcctaacggcgaagatggcgacgatgaagattttgtcgatgaagacgatgacggagttcgccactaattaagcgtagcgcatcaggcccaggtagttcctgcaacctggtgaatttgtagcccggataaggcattcatgtcacatccggcataaacaaaacgtacgttgttaatgttcgaatgcccgcgagttgaacacgcgggcatttttttagagttcgcgcaacatccgcacttcacaatcgacatggcccgtgcagccaagcgcatagtcgatatgctcaaagcccaaatgctcataaagcgcaatggcttcctttaaaaaagcggtcgtttccagatagcagcgtttgaaacccatctctcgcgcctgctccatcgccattaaggccagtttttttgccagccctttgccgcggatagccggaagaaaatacatcttttgcagttcgcaaatatcgctctcactcccggttaatggcgctatcccaccgccgccgaccacttcaccctcgtactcaacgacccaatatgcatggccaggctgactatatacttgatacagctcgtcaagattcggatcggcgacggtgtagcctttatcagcggtaagaccgtattcggcggatacctgacgaatgacgcgggcgatagcaggattatcctgcagcgtcaggcgacgcattacaggactttgcggcgcaatgttattcatagtttaacccaataaaaataaagtaattatacatttgtttaataccactctcttcttacgtacgcaagcgacttataaagtaataaagtttttgccagcctattactgataagagtattgtaacgtggcagaacattttactgtctgtatatataagttatatcaatggattttttaattcagggaatttttatggctcaagttattaatgaaatggatgttccgtcccatagctttgtttttcatggtacaggtgagagatattttcttatttgtgtggtgaatgtgttgttaacgattataacgctaggtatctatttaccatgggcattaatgaaatgtaagcgttatctttatgctaatatggaagttaacggacaacgattttcttatggaattaccggtgggaatgtttttgttagttgtcttttttttgtttttttctatttcgcaatcttaatgacagtgagtgcagatatgccgcttgttggttgtgttttgactttgttactgttggttttgcttatatttatggcagcaaaaggactgcgtcatcaggccttaatgaccagtctcaacggcgtaagatttagttttaattgctctatgaaagggttctggtgggtgacctttttcttgccgattttaatggccattgggatggggactgttttctttatcagcacaaagatgctacctgccaatagtagtagtagtgttattatatccatggttctgatggcaatagttggtattgtttccattggtatttttaatggtactttatatagtctggtaatgagttttctctggagtaataccagtttcggtatacatcgtttcaaggtgaaattagatactacgtattgtataaaatatgccattctcgcatttttagctttattgccttttctcgctgttgctggttatattatcttcgatcaaatattaaatgcgtatgatagttctgtatatgcaaatgatgacattgagaatttacagcaatttatggaaatgcaacgtaaaatgataatcgcgcagttaatctattattttgggattgctgttagcacaagttatttaacggtgtctttgcgaaaccattttatgagcaacctgagtctgaatgatgggcgtattcgttttcgcttaactttaacgtaccacggtatgctttatcgcatgtgtgcgttggtggtgatatccgggattacgggcggtctggcttatccactgctgaaaatatggatgattgactggcaggcaaaaaatacgtatttgctgggcgatttggatgaccttcctttaatcaataaagaagaacaaccagataaaggcttcttagccagtattagtcggggagttatgccttctttaccatttctgtaagagataaaaaaggccggagcatgctccggccttcgttttcatcactgtgttttgattacagcgcggcgataacagcctgctgttcaatcagtttcgctttcgcttccgcatagccttccagcttctcacgctctttcgcgatgaccgcttccggtgcgcgggcgacaaagccttcgttcgccagtttgttctcgatacggctgatttcaccttcaatcttcgccacttctttcgccagacgcgccagctcatcttctttgttgatgaggccagccatcgggatcagcagctctgcaccgtcgatgatcttcgtaacggaaaccggacctttgtcatcggcaggcagcacggtgatactttccagacgcgccagggtttgcaggaagccacggttttcatttacgcgacgttctgcatccgcgctgcaaccacgcagcagcagctccagcggtttgcccggcgcgatgttcatttctgcacggatgttacgtaccgcaacgatcgcctgtttcagccattcggtgtcggccagtgcggcttcatcaacctgagatgcatcgtactgcgggaacggctgcagcatgatggtgtcggcagtgataccgcaaagtactttcacacgctgccagatggtttcggtgatgaacggaatgatcggatgcgcgaggcgcagcagaccttccagtacagtcaccagcgtatggcgagtaccgcgcagttctgcttcggtgccaccgttcattaccggcttggtcagctcgagataccagtcacagaactggttccaggtgaactcatacagaatgcctgcggcgatatcgaagcggaagctgtccagcgcttcgcggtacgctttgatggtctggttgaactccgccagaatccagcggtccgccaggctcagcgtcatttcgccgccgttgaagccgcaatcctgaccttctgtgttcatcagcacaaagcggctggcgttccacagcttgttacagaagttacggtaaccttccagacgcttcatatcccagttgatgtcacgaccggtagacgccagcgccgccagggtgaagcgcagcgcgtcagtaccgtgcggctcaataccgttcgggaactgcttctcggtgcgcttacggattttgtccgccagctgcggctgcatcatattgccggtacgtttttccagcagttctggcaggctaataccgtcaaccatatccagtgggtcgataacgttacccttggatttggacatcttctggccttcgtcatcacgaatcaggccggtcatgtaaacggtgtggaacggcacctgcggtttgccattttcatctttgatgaagtgcatggtcatcatgatcatgcgggcaatccagaagaaaatgatgtcgaaaccagataccatcacgctggttgggtggaactgacgcagggcgtcggtattttccggccagccaagggtagagaaggtccacagcgcagaagagaaccaggtatcgagaacgtcttcgtcctgacgcaggacaacatcagcaccgaggttattttctttacgcacttcgtcttcgttgcggccaacataaacgttacccgcttcgtcataccatgccgggatacggtgaccccaccacaactgacgagagatacaccagtcctgaatatcgcgcatccaggagaagtacatgttttcgtactgcttcggtacgaactgaatgtcgccgttctcaaccgcttcaaccgccggtttcgccaggacatcggcacgcacgtaccactggtcggtcagcattggttcgataactacgccgccacggtcgccgtaaggaacggtcaggtcgtgcggtttaatttcttccagcaggccaagcgcgtcaactgcggcaacgactgctttacgtgcagcaaaacgctccagtttctggaactctgcagggatttcgctggaataaacgtcagattcgttacctttggtatcgaacacctgggcgctttcacggatatcgccgtcaaaggtcaggatgttgatcatcggcagggcgtgacgtttacccacttcatagtcgttaaagtcgtgcgccggagtgattttcacgcagccggtgcctttttccatgtcggcgtgttcgtcgccaacgatcggaatacgacggttaaccagcggcagaatgacatatttgccaatcagatctttgtaacgcggatcttccgggttaacggctacgccagtatcgcccagcagggtttctggacgggtagtcgcgaccaccagataatctttaccgtctgcggttttcgcaccgtcagccagcggatagcggatgtgccacatgctacctttgctttcgcggttttcgacttccaggtcagagatagcggtgcgcagtttcggatcccagtttaccaggcgtttgccacggtaaatcaggtcttctttatacagacgaacgaaaacttctttcaccgcattggacaggccttcgtccatggtgaagcgttcacgctcccagtcgacggagttgccgagacggcgcatctgacgggtaatggtgccgccagattccgctttccattcccagattttgtcgatgaaagcttcgcggccgtagtcgtgacgggttttaccttcttctgcggcaatcttgcgctcaacgaccatctgggtagcgatcccggcgtggtcagtaccgacctgccacagggtgtttttgccctgcatgcgctgatagcggatcatggtatccatgatggtttgctggaaggcgtgacccatatgcaaactgccggtgacgttcggcggcgggatcatgatgcagaaactttcctggctttcatcgccattaggcttaaagtagccctgcttttcccagtgctcgtaaagcggctgttcgatatcttgtgggttatatgtcttttccattatttccaggttgccgtattcaggttgaaaccagccacgcggtaggctttatagcgttcgcgcgccagttgtttcagagaatcttcataaggaacgaagtctaccacttctgtgaaagcggtggcaaaatctgcaaagcttgttcgcagactaatcaatatatcgcgccggctgctgctacgcttttgcggccaggcgatctccaccggtgcaccgccgcgcggtccttctcccgctaaattatgcggaacaaagctttctgccggacgcgcccacagggcttcatccagccggtaagcctgcttttcatcttcacaggcgatgagcacgcgcttaccgctgcgccaacgttctgcggcaatttcacacaccagttgctcaacggcgcttaagccatcgacggtggtgtcattgtccagaaggtagaacgtcgcgtttttcataaatggggcttcttgtggtggatttaaatacgcatcaggtatacaccgcagcgcctgatgcgacgctgttgtgtcttatcaggcctacgagttcagtgctgtgtaggtcggataaggcgttcacgccgcatccggcaataacagccttgcctgacgcaattactcttcgccgttaaacccagcgcggtttaacaggaactgtgccagcaacgctaccggacgaccggtggcgccttttgctttaccagaacgccaggcggtaccggcgatatccaggtgcgcccagttgtacttacgggtaaagcgactcaggaagcaacctgcggtaatcgccccaccaggacgaccgccaatgttcgccatatcggcaaaattggactccagttgttcctgatactcgtcacccagcggtaagcgccatgcgcggtcaccggattgttcagacgcggcaatcagttcatgggccagcggattatggttcgccatcagaccagtaatatgatgacccagcgcgatcacgcaggcaccggtcagcgtcgccacgtcaatcaccgcttccggctcaaaacgctcaacgtaagttaacacgtcgcacagtaccaggcggccttcagcgtcggtgttcagcacttcaacggtttgaccggacatggtggttaacacatcgcccggacgataggctcgtccgccaggcatgttttcgcagcctgccaacacgccgataacgttaatcggcagttgtagctccgcgaccatccgcatcacgccgtaaaccgctgccgcaccgcacatatcgtacttcatctcatccatgccttcactaggcttgatgctgataccgccggagtcgaaggttaaacctttacccaccagcacgattgggcgtgcatcttcgctcgcgttgcctttgtactcaatcacgctcatcaggctttcgttttggctaccctgaccgaccgccagataggaatgcatccccagctctttcatctgctgttcgccgataacgcgggtgatgacattcttgctgtagctgtcagccagctggcgcgcttgactagcgaggtaagcggcgttacagatattcggcggcatattgccgagatcttttgctgctttaatcccggcggcaatcgccagaccgtgctggatcgcgcgctcaccgctggtcagttcacggcgggtcggcacgttgaacaccatcttacgcagcggacgacgcggttcgctcttgttcgttttcagctgatcgaaactgtagagcgtctcttttgccgtctcgacagcctgacgcactttccagtagttgttacggcctttaacgtgcagctcagtcagaaagcagaccgcttccatactgccagtatcattcagcgtattaatggttttctgaataacctgcttgtactgacgctcatccagctcacgttctttgccgcaaccaataaggagaattcgctcggaaagtacattcggaacatggtgcagcaacaatgtctgccccggttttccttccagttcgccccgacgtagcagggcgctgatgtacccatcgctgattttatcgagctgttctgcaatcggagaaaggcgacgtggttcgaagacgcccacgacgatgcaggaactccgctgtttctccgggctaccgctttttacactaaactccatgcactacgctcctgaatcttaaagacaacggcggtggctacagatagaattgcaagctttcgtaactcatgtccgctgttgcgatgacttcgtgttaatcttaacgttattacggcattggcacgtcagaacaaaatctgagaggtgaatccgttgagtataattatcttagcgacgatttcgacgactcaagagaataaatgacgtttaagccatgaaacaagctaaaatcctgcaaaagacgagtttttacgggcgtatttaaagtgataatcataagatatctggtgcgggagacgctcaaaagccagctggcgatactcttcatcttgcttttgatcttcttctgtcaaaagttagtgaggatcctcggcgcagcggttgacggcgatattccggcgaatctggtgctctcccttctcgggttgggcgtgccggaaatggcgcagcttatcctgccattaagcctgttcctcgggctgctgatgacgctgggcaaactgtataccgaaagtgaaattacggtaatgcatgcctgcggcctgagcaaagcggttctggtgaaagcggcaatgatccttgcggtattcacggcaatcgtagcggcggttaacgtgatgtgggcgggaccgtggagtagccgtcatcaggatgaagtgttagcagaagcgaaagcgaaccctggcatggcggcgctggcgcaagggcaattccagcaagcgactaatggcagcagcgtgctgttcatcgaaagcgttgacggcagcgatttcaaagatgtgttcctcgcgcaaattcgaccaaaaggtaatgcacgtccttctgtggtggtggccgattccggacatttaacccagctgcgcgacggctcccaggtcgtcactctcaaccagggaacgcgcttcgaaggcactgcattgttacgtgatttccgcattacggacttccaggattatcaggcgatcattggtcaccaggcggtggcgctcgacccgaacgataccgaccagatggacatgcgcacattgtggaacactgacaccgatcgtgctcgcgcagaactgaactggcgtatcacgttggtattcaccgtgtttatgatggcacttatggtcgtaccgctgagcgtggttaacccacgtcagggacgcgtactgagcatgctgccagccatgctgctgtatctacttttcttcctgatccagacctccctgaaaagcaacggcggtaaaggtaagctggacccgacgctgtggatgtggaccgttaacctgatttatctggctttagcgattgttctcaacctttgggacaccgtgccggtccgccgcctgcgcgccagttttagccgtaaaggagcggtgtgatgcaaccttttggcgtacttgaccgctatatcggtaaaactattttcaccaccatcatgatgacactgttcatgctggtgagcctgagcggcattatcaagtttgtcgatcagctgaaaaaagccgggcaggggagttacgacgcgttaggcgcaggaatgtataccttgctgagcgtgccgaaagatgtgcagatcttcttcccgatggcggctctgcttggggcgttgcttggtcttgggatgctggcgcagcgcagcgaactggtggtgatgcaggcttctggttttacccgtatgcaggtggcgctgagcgtgatgaaaaccgccattccgctggtcttgctgacgatggcgattggcgaatgggtcgcgccgcagggcgagcagatggcgcgtaactaccgtgcgcaggcgatgtacggcggcagcttgctctctacccagcaaggcttatgggcgaaagatggcaacaacttcgtctacattgagcgggttaaaggtgacgaagagttaggtggcatcagcatttatgcctttaacgagaatcgtcgtctgcaatccgtacgctatgccgctactgcgaagtttgacccggaacataaagtctggcgtctgagccaggttgatgaatctgatctgaccaatccgaaacagattaccggtagccagacggtgagcggcacctggaaaaccaacctcacgccggacaaactgggcgtggtggcgctggacccggatgcactctctatcagcggtttgcacaactatgtgaagtatctgaagagcagcggtcaggatgccggacgttatcagctcaacatgtggagcaaaatcttccagccgctatctgtggcggtgatgatgctgatggcgctgagcttcatctttggcccactgcgtagcgtaccgatgggcgtgcgtgtggtcaccggtatcagtttcggttttgtcttctacgtactggaccagatcttcggcccgctgacgttggtttatggcatcccgccgatcatcggcgcactgttgccaagcgccagcttcttcttaatcagcctgtggctgttaatgagaaaaagctaaccgaatgaacgaataaagggagcgaaagctccctttattattgttagcaaagtgtgcttcgttcattcctgaaaaataattaaaattcaatatattgcagtggggtgggcatgataagacgcgccagcgtcgcatcaggcaaagacaaatctcgcctgacttaccttcttctcccccccagcaaactccccaacatcccgcgtacaatctgattcgtcacttggcgagcggcgcttttggccattgtttgcaccacaccatctttcttcccgccgcgtggtccggtagtgccgaacaaaatatccttcaatccaccaagaatgccgtcatccaccgctacctctttccctttcgcgggaggattattttgctgctcggtactggcctgaaagcctttttgcaacatctcataggcggattcccggtccacctcatcctcatatttgccatacaccggagagtgattaatcaagccattacgctcatcttccgtcaccggccccatccggctacaaggcgcgatcaccatcgcacgctccaccacagaagggcttcctttcgcatccagaaaagagatcaacgcctcgccggtgcccagttcctgaatcgccttttcggtatcaaacgccggattggcccgcatggtttgcgccgctgccttcactgctttctgatcttttggcgtaaaagcccgcaaagcatgttgaacgcgattaccgagctgcccgagcacattatccggaatatcagacgggttttggctaacgaaccagacgcccacgcctttactgcgaataagccttatcacctgctcaatcttatccagcagtacctgcggggcatcgttaaacagcagatgtgcctcgtcgaagaaaaacaccagttttggtttctccagatcgcccgcttccggcaattgttcatacaactcactaagcatccacagcaggctggcggcgtacagtttcggcatctgataaagtttctcggcgctgaggatattgataacgcctttaccgttggcatcggtgcgcatccagtctttgatatccagcatcggctcaccaaagaagtgtgctgcgccttgctgttccaggctcaacagcccgcgctggatggcaccaacgcttgcgctactgatattaccgtactgattctggaaggatttggcgttatcgccgatgtactgggtaattgcccgcagatctttaaagtcgagcagtaacagcccctgatcgtcagcaatgcggaagatgatattcagcacgccagattgcacatcgttgagattcaacagtcgtgccagcaacagcggccccagatcgctaaccgtcgcccgcaccggatggcctttctcgccaaagatatcccacaccaccaccggattggcatgcggttgccagtcattgacgccgatatttttaagccttgcgagcagtttttcgctcaccgttcctgcctgcgcgacgccggtcagatcgcctttcacatcagccataaacaccggcacgccgatttcgctcaaactctccgccagtttttgcagcgtaacggttttacccgtccccgttgcgccggtaatcagcccatgacggttagccattcccggcagtaaaaacagttctgtgtccggcgtgcgggcaattaacaggggttcactcatgagatatcctccagtttcctgcctggagtataggcaacgtccggcaaagagaatacgtgtaatgaagagaaaataacttaaagcgtgttgccgtgataaatctgatacccgaggtcaacagtgttgtggttgtgatcgttatttttaattttgctcagcaacatttgggcggccatccgaccaatatcaaaacggggagtaattacgctggcgaggcttgggatcatttgcctgccaatctccagcccatgaaaacccgcaatggaaatttgttctggcacggcgaggtttcgctcgcggcacagcagaagcgcacccatcgcaatatcgtcattggtgcaaaatacaccgtctaaatccgggtttgcgctaagggcatcacgcattaactgcattcctaaatgaatggaactgatggcgcgtggattcatgcgtaatggggaaagattatgcagcatcatcgcatcgcaatacccctgataacgctgttcatcgcgggtgtcatctttggaaccgagatacagaattttgtgcctgactcgcttctccagcatggtacacaccatgtcaaaagcggcctgccgattatcaaaaccgacctccatatccagccgttctccctgtacatccatcaattccacgaccggaatggtggcactacgcagaaatttcaccgtcctgatggtgtgatatttttcgctaagtataatcccgtcaatgttataagagagcaggttaatcacgctctcttcttcggaatcgcgatcgtaattgtaattagcaataagggtctgataattatgctcagaggtgacggattctattcccgcgagaatgtcagcgaagagttgattttgaaaactcggaatcaagataccgagggtataactttgtgcattcaacaacatgccgggagcgcgattagggatataattgatctcttccataattttggcgatgcgctcgcctgtttcctttgccacctttttcgggctgcggatataacgactcacggtcatttttgttacgccagccagcgtagcgatatcctgtaaagaaattctgtgattgcgcataacttctcccaacgtcgggggaatcttcaatcttcccccgaaactacatcacaatattttattctttcagtgcaatacggcgttaatggctaacacgcccagcaaacccataatagaaataagggtttccatcaccgtccaggtacgcaacgtttcaccaaccgtcagattaaaataccctttaaatagccagaagccagggtcgtttacgtgactcgcgatcacgctgcccgcaccggttgccagtaccattaaagcgggatcggcatgggtaacgttgataatcggcaacaccacacccgcggtggtaatggccgcgacggtggcagagcccagagcgatacgcaacagcgccgcaacagtccagcacatcaataacgggctaagtgtagttccggtcattaagtgactaatatagtgcccgacaccgctatctactaatacctgcttaaacgcgccgccgccagcgataataaacacaatcatcgcgatagcgcctatagaatccccaatgatatccatgatttgctcgatggtgcgtccattacgtcggcccagtgtgaaaatcgcaataacaatggcaataaacagcgcaacggcagggttaccgacaaattcaaagaagaggcgcacggtgttagttttcggtaacgtaatttcacaaacggcggcgatagccatcaggatgaccgggatcacggcagcgaaaatactgttccagaaggagggcatctcctcttcgctaaacagatgaggattaaataagccttccggtggtgctttctcaaagcgagttagcagtttagaaaacagcggtcctgcgacaataactgtcggaatggtaatgataaatccatacagtaaagtcgttccgagattagcctcaaagatagtcgcgatggcagtaggccctggatgtggcggcagaaaacagtgggttacagagagcgctgctaccattggtacgccaacatacaacaggggtaatccactacttgctacgatggtaaataccaacggcaacagcaggacaaaacccacttcaaaaaacatggcgaggcccacaaccagaccggtgatcactagcgcccattgcacgcgttttttaccaaaagtagcaatcagcgtagtggcgatacgttgtgccgcacccgtatcagaaatcagcttgcctaacatggccccgaaaccgaggatcattgccagcccgccgagcgtgctgccgataccattttgtatagagtgcaggacggcctgtgcatccatcccttcggcaaatccgacgacggcagctaccagaacgagggcaataaagccgttaactttaaagccgatcatcaggataagaagcagcgcgacgcctgccgcaataatgattaatggcatagtctttatctcttattagtgccagaaaagcagcgctttcgcgctgcacgtaggggggctgttaaacagccactaacatgccgccatcaacaaacaacaggtggccgtttacgaaatcagaggctttactagaaaggaacaccgcagcaccaatcagttcctgcggatctccccagcgtgcggcgggggtccgtttgcacaaccaggcggtgaaggcttcgtcctcaaccagtgctttagtcatttctgttttgaaatagcccggcgcaataccgttgacctgaatattgtggcgcgccagctcgacgcacatgccgcgggtgagcatttttaccgcccctttgcttgcggcataaggggtgatggtgtcacgtcccagttcgctttgcatgctgcaaatattaataactttacctgccttgcgttcaaccatgtgacgagttaccgcttggcttaccaggaacacggcggtctggtttactgcgatcacatcattccactcttgttcagggaactcagtaaaaggatgacggcgctggataccggcgttattcaccagcacatcaatggggccgatgtccttttcgatatgttcaacggcggcatcaatttcatgtttatgagtaacattaaaaggtgcggcaacggcctgaataccctcctggtggagtttttctacagcaagttctgcgcgttcggcagtaatatcattaataattatttgtgcgccatatttacccaggccggttgccagtaaaaagccaatgccctgtgcactaccggtaatcaagatattttttcctgccagactaaatagatcgttcattgtattattcctttatttatctcttagaaaacaagctggacttttgctgcctgggttttatcaccggcgaaacgtagcgcctcttccaggtcagtgaagggatattcagcactcagtaaaggcagtggattgataacgccattcgccagccaactcactgcggtattaaattcgctggtaaaacggaaagagcctctgagactaatctccttaccaatcaacgtcatcattgggaattctgccatcgcgcctcccatacctacctgcaccattacgccgcgtgcacgagtgacctccagacaggtattcacactactaggatgaccggacacttcaaagctgacatcgaaatagcctttttccgctttccagtgatccatgtcgtcgttttgtgggtttacgagcacatccgcccccatctctttgcccaggctaagggaacggggactcacatcagcacagacaatttccgcggcccccagtgttttcactgcactgacaatcaggcagccaatgggtccaacaccggaaataaatactcgcttgccctgtaactcgccggcctgatgtgcggcatgaatcgcgacggctaaaggttcggcaaaagccataaccttttcgtcagctttggccggataagggacacattggctcgtttcgaccattttataacgggtaaaaccaccatcaacatgagggaaatacatggcactgccaaaaaaacgcatatctgtacactgattctcgttatgttcaatgcagtatttgcagtgaccgcacggtttagacggattaatggctaccgtttgcccttcatgtaattcactactgtcgctatgaataactttaccgataacttcatgacctaacaccatcggtgcctttatcatgaaattacctacttttccttcctgataataatgtaaatcggaaccgcaaattccacctcgggttatttgtactaatgttccattattattccaatctatcgtctgctcggtaacggcaacagttttcttgcccgcaacaacgcaggactgtgttttcacttgcataaattcctcactggtcaggtagacacctcggaagcatttaagcggttttaactgtcattatttgtgatgaagatcacgtcagaaaattgttacattactatgttacgcataacgtgatgtgccttgtaattcttatcagtagaaataaaaaaacgtgaaattattatgccgccaggcgtagtatcgcagcaggtaagatgattcaggagattttaaatggcgggtgaaagctttattttgatgggcgttagtgggagtggtaaaacattaattggtagcaaggttgccgcgttattatctgctaaatttattgatggtgacgatcttcatccagccaaaaatatagataaaatgagccagggtattccattatctgatgaagatcgacttccctggctggaacgcttaaatgatgctagttacagtctttataaaaagaatgaaacaggatttattgtctgtagtagtttaaaaaaacagtatcgtgatattttacgcaagggtagcccccatgttcatttcctctggttagatggcgactatgaaactattctcgcgcgaatgcagcgtcgggctgggcattttatgccggtagcgttactaaaaagtcagtttgaggcactggagcgtccacaagcagatgaacaggatattgtgcgcattgatatcaaccatgatattgccaatgtcaccgaacaatgtcggcaggctgtgctggcgatacgacaaaacagaatatgtgcgaaagagggcagcgccagtgatcagcgctgcgaatgattttcaaaaatcggctttcaacaccacgcggtaacgcgccttaccgtcgcgcacatgctggatggcgtcgttaattttgctcatcgggaacagttcggtggtcggcgcaaccttgctgcgggcggcaaaacgcatcagcttacgcagctcataaggcgtgccggtagcagaaccagagacgctgcgatcgcccgcaattaacgtaaaggccggaacagacagcggcgtgagaaccgcaccgaccgtatggaaattaccgccataggtcagcgcctcaaaatagggctgccagtcgaggctgacgttgacggtgttgataatgagatcaaactgccccgccagtgctttcagtgcctgcggatcgcggctattcaccactttatcggcacccatcgccagcacttcctgctctttcgccggattagaactaaaggctgtcacctcgcatcccattgcgtgcagaagttttatagcgatatgccccagcccgccaataccaattaccccaacgcggctggtagcagtgatatggtgcatcaacagtggtttaaagaccgtgataccgccgcacaacagcggcccggcggactcgatatcaatattttctggcagtggaatcacccattgccagtccgcacgcaacttctcggcaaagccaccgcgattcataatcgtcggcaccgcaccttgctcgcagttgatctgattaccgctaatacaggcgtcgcagtgaccacagctacgcgccgtccagccaatcccgacacgctgaccgacctgcaaacctttatcctgcgcggcgctcccgagtgccaccacgcgcccaatcacctcatgcccggcaaccagcggatattgactaaatccccattcgttatcgatcatgctcagatcggaatggcagatcccgcagtaatccacctgcacttcaacatcttgtggcctcagctcaccgggatcgtactcataaacttccagttcgccgcccgcttcttttgcggcatagctttttatcatgctcattttttggtccttctctggtgttgtttgggaagtgtagagcatggcagggcggggtgcctggagtgtgacaaaggttacacatcgctgtatgcaatgctgaaaatttcagcacttagcgaggtgcgagcaagctggcgcttgcatggtggcgtgcgacaggtataatccacaacgttttccgcatacctcttcagtgccgaagtggcgaaatcggtagacgcagttgattcaaaatcaaccgtagaaatacgtgccggttcgagtccggccttcggcaccaaaagtatgtaaatagacctcaactgaggtctttttttatgcctgaaatccagtgtttatctatctttcccgctatattaactctctcaaggtcaaccgatatcaacgtacatctaccaacatatgttggtacagatgatggtatttccggttcgataatgcttgtaccaacagggagggaatacgagaaatcacaggacattgctaatgctggtacgcaatattacctgaagctaaaaacctgcacgttagccctttgtaggccagataagacgcgtcagcgtcgcatctggcataaacaaagcgcactttgctggtctgttcccctcaccctaaccctctccccggaggggcgaggggactgtccgggcacatttttagactttgtcatcagtctgagcctgccattggcaggctctggtgtccttttacgctaccatgctaataatcagcacaataatcagcccaaccacggagttgaccagctccagcagaccccaggttttcaacgtgtcttttacactcaggtcaaagtaacctttgaacaaccagaaagatgcatcgttaatgtgggtgagggtgttggaacccgcagccgtcgccagtaccagcagcgccggattcacgccaaccagctgaccagttgctggatctaggattgcagcactgataatcccggcggcggtcatcgcgctaacgacaccctgacccgtcgccagacgaattagcacagtgatcagccatgccatgatgtaggggctgatattgccgtgggacatcaacatgccgatggtgtcgccaatgccggtgtcgatgatggtctgcttcagcacgccacccgcaccgatgatcagaatcaccattgcaatactcttcaccgcgctttcaaaagcgttcatcacccactgcatgtcatgaccacgtgcggtgccaaagagtacgaatgcaaccaccatcgcaataaacattgcaatcgggctggaaccgataaagttaaccacttcccaggcaggggtatcttttaccagccagatattggcgatggtggtagagatcataatgatcgccgggatcagcggcaccagaatgctaacgccgaaagagggcagattattcatatctaccggttgatctgctttcaggaaacttggcgttgggcgctcaagattgccgaggaacttcggcaggatcagacctgcgcagattacacttgggatcgtcaccagtacgccatagatataaaccatccccatatccgcgccataagcattcaccagcgccaccggacccggctgcggtgggaacagactatgtgcggtagtggcagctgctactgccgggatcgccagtttcaggaacggaattttagcttcggcggcaataacaataaccagcggcgctaacatgataaaggccacttcatagaacatcgccagaccaaaaatcaggccgatgataatcacgctcagctgtacatagcgcagaccgagacgcgccagcagcgtatgcgctatctggtgagccgcgccggagtcgaccatcaatttaccgatgaccgcaccgaacaccacgatgatagccagttcccccagcgtgttgccgaagcccgctttcatagtgtgcagcaggctcatcaaatccatgcccgccagcatcccgacggacagcgccgccaccaacaaagccaccatactattgattttgaacttcaaattcagtaccagcatcagaccaatgccgaataccacccagagaatgttaagcacatgcataacgttttaccttacctggttgaaccgttgttattttgggcgatatgttatgtaaattggtcaaccattgttgcgatgaatgtcacatcctctgatcaataaccatcgattaccctttgctgcaatttgcagcaacaaccatgagagtgaaattcttgtgatgtggttaaccaatttcagaattcgggttgacatgtcttaccaaaaggtagaacttatacgccatctcatccgatgcaacgccacggctgcggtctggttgttcatccggatacctaaacaactccagggttccgcgtctctttgctgtggaacccactatgtgaaagaggaaaaatcatggaacagacctggcgctggtacggcccaaacgatccggtttctttagctgatgtccgtcaggcgggcgcaactggcgtggttaccgcgctgcaccatatcccgaacggcgaagtatggtccgttgaagagatcctcaaacgcaaggcgatcattgaagacgcaggcctggtgtggtctgtcgtagaaagcgtgccaattcacgaagatatcaaaacccacactggcaactatgagcagtggatcgctaactatcagcagactctgcgcaacctggcgcagtgtggcattcgcaccgtgtgctacaacttcatgccggtgctcgactggacccgtactgacctcgaatacgtgctgccagacggctccaaagctctgcgcttcgaccagatcgaattcgctgcattcgaaatgcatatcctgaaacgcccaggcgcggaagcggattacaccgaagaagaaattgctcaggcagctgaacgcttcgccactatgagcgatgaagacaaagcgcgtctgacccgtaacatcattgctggtcttccgggcgcggaagaaggctacaccctcgaccagttccgtaaacacctggagctgtacaaagatatcgacaaagcgaagctgcgcgaaaactttgccgtcttcctgaaagcgattattccagttgctgaagaagtcggcgtgcgtatggctgttcacccggacgatccgccgcgcccgatcctcggcctgccgcgcattgtttccaccattgaagatatgcagtggatggttgataccgtaaacagcatggcaaacggttttaccatgtgcaccggttcctacggcgtgcgtgctgacaacgatctggttgatatgatcaagcagttcggtccgcgtatttacttcacccatctgcgctccaccatgcgtgaagataacccgaaaaccttccacgaagcggcgcacctgaacggtgacgttgatatgtacgaagtggtgaaagcgattgttgaagaagaacaccgtcgtaaagcggaaggcaaagaagacctgatcccgatgcgtccggaccacggtcatcagatgctggacgacctgaagaagaaaaccaacccaggttactccgcaattggtcgtctgaaaggcctggccgaagttcgcggtgtcgaactggcgatccagcgcgctttctttagccgttaatatccaccggcatggctgcgcgccgtgccggttccttcttccttgccgtcactctttgaagacggattctggagtttacgatgactactattgttgacagcaatctgccggttgcccgcccgagttgggatcattctcgtctggaaagtcgcattgtgcatctcggttgcggggcgtttcaccgcgcgcaccaggcgctgtatacccatcatctgctggaaagcaccgacagcgactggggcatctgcgaagttaacctgatgccaggcaacgaccgcgtgctgatcgaaaacctgaaaaaacagcaactgctgtacaccgtagcggaaaaaggcgcagagagcaccgagctgaaaattatcggtagcatgaaagaagcgctgcatccggaaatcgatggctgcgaaggtattctcaacgcgatggcgcgtccgcaaacggcgattgtctctctaacggtcacggaaaaaggctactgcgctgatgcggcaagcggtcaactggatctcaataacccgctgatcaagcacgatctggaaaacccgactgcgccgaagtccgcgattggttacatcgtcgaagcgttgcgtctgcgtcgtgaaaaagggttgaaagcgtttacggtgatgtcctgcgataacgtgcgtgaaaacggtcatgtggcgaaggtcgcggtactggggctggctcaggcgcgtgacccgcagctggcggcatggattgaagaaaatgtcaccttcccgtgcaccatggttgaccgcatcgttccggcggcgacgccagaaaccttacaggaaattgctgaccagctgggtgtttacgacccgtgcgccattgcctgcgaaccgttccgtcagtgggtgattgaagataacttcgttaatggtcgcccggattgggataaagtgggcgcacagttcgttgcagacgttgtgccgttcgaaatgatgaagctgcgtatgctgaacggcagccactcttttctggcgtacctcggttacctcggcggctatgaaaccattgccgacaccgtgactaacccggcttatcgcaaagcggcctttgccctgatgatgcaggaacaagcgccaacgctgagcatgccggaaggtacagacctgaacgcctatgcgacgctgctgatcgagcgtttcagcaacccgtctctgcgtcaccgtacctggcagattgcgatggacggcagccagaagttaccgcagcgtctgctggacccggtgcgtctgcacctgcaaaacggcggcagctggcgtcacctggcgctgggcgtggctggctggatgcgttacacccagggcgtggatgagcagggtaatgccattgacgtggtcgacccgatgctggcggagttccagaagatcaacgcgcagtatcagggcgcagaccgcgtgaaagcgctgctgggcctgagcggtatttttgccgatgatctgccgcagaatgccgactttgttggcgcagtgacggcggcatatcagcagctgtgcgaacgcggtgcgcgcgagtgtgtggctgcgctgtaactaactgattaccctacagacttactggtcaatcaaactgatatttggttgaccagttttcgtttttttgcccacctgtacgtgccaacttccagtgctaatggtatagtttgagattaacgggggccgtaaaattgcccgttgtaggccggataaggcgttcacgccgcatccggcaaaaatttgattaaccgcacctaacggacacaacaccatgaaatctgccacctctgcgcaaagaccttaccaggaagtcggggcgatgatccgcgatctgatcataaagacgccgtacaatcctggcgaacggctgccgccggagcgtgaaattgcagaaatgcttgatgtcacgcggacggtggtacgtgaagcgctgatcatgctggagatcaaagggctggtggaagtacgccggggtgccggtatctatgttcttgataacagtggcagccagaacacagacagtccggatgccaacgtctgcaacgatgccggtccttttgagctgttacaggcgcggcagttattggagagcaacatcgccgagtttgccgctttgcaggctacccgcgaagatatcgtcaaaatgcgtcaggcattgcaactggaagagcgtgaactggcttccagtgcgccgggcagcagcgaaagcggtgacatgcagttccatctcgctattgccgaagcaacgcataacagcatgctggtggagctgttccgtcagtcctggcagtggcgggaaaacaatccaatgtggatccagttgcacagccatctggatgacagcctgtatcgcaaagagtggttgggcgatcacaaacagatcctcgccgcgttaatcaaaaaagatgcccgagcggcgaagctggcaatgtggcagcatctggaaaacgttaagcaacgtctgctggaattcagcaacgttgacgatatttattttgatggctatctgtttgatagttggccgctggataaagtcgacgcctgacttattataataagcgcaagggtaaacgttccttgcgctttcttaaattaagaagtcgcaatgagtattactttgtaaattgcagggtattgtttagctatctgtataacctgaatgttagtactcattcttcctggtagtaaggcgagattattaaagttgccatgcagcgtccggggaagtgttgggcgctgttttttttgtttcttaataatgtgttgtaagccgtagaaggcgtgtaggtcgcaccctatgcgacctacacatcagtcaggaattacccttcacgttctaccactttaatttccaccatgccgatcccgagcttacgcgggctgtgtccgaggatattcccttcgttggtactgacaggttccggcggcacaattaccagtgtgtcggcatcggttgggttatcgaaatgcagtgtggtggtggtcacttcattgcccagcacaagagtttgttcttcattgcctacgcgtaccggaataggacggctggcgttattgccgtatgctttggcggtaatcaccaggtcaaatttcttcggcagcggatgcttgtactcgatttttacttcatcgcccagctgcgcgttggaccagcggccccagctctccggacgggaaatcccgctaaactgtttcacctcttctggcgcaccggcgacgttaaagatgaaactgtcggctttgtagcgaatatcgttatcaacaatcttcagcgtatcgacattgcctttgtaacgcgccatgtcgatgaccgtatctttaaatgccgttttgccctgccatgttgttttgtcaacatgctgaacaatttgctgaccgccaagctgcccttggctgacacaccagtcggtggaaagtgccagttccggagcccagagttgtgccatcttgtagcaacggtcaacccagacgaaattgtcgcgtggagcgaaatcggccagctggaaacgcagcggtgcactgtattcgctttccggcagcggttccacgcgtttgtcactaacccgcaacagcagcggcaaacggaaatggctaccgctgaaggcaatcatgtttttctgctggtcgatggtgaactctttcatctctttagggaatttccacaggcggatgatatctggcttccacgccaatgttttctctttgatattgaggaagatttcgctcatgctctgcccggataaactgctacgaccaagtccgagatagttatcgccaccgagaatgtccagcaccgtcgcgccgttatccatcgtgttacgcttcactgccagcgtctcttgctgcggcttgtcgccacgaatgacaaaaaacaggttattgcgatcctgcttattgaggtatttccacgccgtgttgttcatcgctaaatggtcagaagagacgacgatgacggtatctttaaaccacggactcgctttgattttgttgataaacgtcgcgatgttctcctggctgcaacttaccgcgctgaaactctgattcggtttaccgtcaaaatcatattttttgcggttacaggtacgagagataaaaccatccgggtgatgggtatcgactgtcagggtaaacagactgaatcgctgaccactgcgggaaagctcttcaaactttttccacgcttcatcgagaacggtatcgtcgtagaatccccagtcgttgcgatagtgcgggtcggctaccacgcttttcagctcttcactgccgtataagtggtcgaagccatggctcttcaggaacacatctttaccggcaaaacgcagattcgcgccctgcacgaaatagttctgataaccgctgtttttcaggatatctcccagacagatgttctgcgggaagaagctggagacagaggcggaggcgttgccttcaaagggggcaaacagcggtatgccgcactgagaagccaccatgcccgcaatcgtgtaatctgttcccggcagctgctgcgtgtggctgaaatccaggccttcatttttcaacgcgcccagttcaggcgtgagatccgggaaagcctcgttatcaaaataggtccgctcgagactttcgccgtagatataaaccaggttgagtttcgggtcagggatagttttgctcggctctttataataagccgcaaagtccgggtcgccgtcgcgactctgggatttcaccagttccgttatctgacgaaatgccgggctggcgtccacgctacccagcgccagtaagagcgccagcaggctgtaaccaaaatggtgcggatgatggcgacgacggcgcaggatccagcccagcgcaccgaacaccgctgtcagccccagcacaatgccgatacccggcaaaatgtatttgctgacgccagcaccggtcaggctgttggttaaggtatagagaaccgcgtcgttaataccatcgccagtaaaatagtcgctggcaaacagggtgatatttaaaacgacaaatagccccagcaccgttaacgtggctgcaaaccaccaggtgttacgtcccgctttccatgcgtaaatcagcacagaggcgagaaaaagggcgaaagagagtagttcactcaacgggcgatcctcactaaaccgggccgtttagccaacgtttaagctttttgagaagcacaatgtaatggcgtcgccatattgctgcaattctagtgtcaaaaaaatgcgatgttgttaggaattagtttataaacagacttttttgattacggtcacttcccgtgtaacaggggtaaaaccgtccaggagcagggaaaagggcaggagagagccgcgtcagccgggtaacagctaaaacgcggcgtttcgcggttcaggaaatgaagttcagcccctgttttaacaccagatcgcaggctttggttttcaccttttctgccagcggagttgttccgatgttatccagattgagttgctgaccatctttggttttcagcaaaccctgaatgccgtccagatagttggtgtcttctttttgctcttcactgttcaggcccagcttttccagcacctggttcttgatgttttcggcatcggttacgctcgccagcttttgcttcgcgcagtattgcagaatgcctgcggcattgttcatgttatctgcgcttaaggcctggtttccgctgctaagcaagttagttaaactcgcgaggctccaaccgccttcctgtgtcgtgctgttttggttgccaagttcgctggcggcgctggagagcgcatctttccaggacgcagcatgcaccccggtggaaattaatgcgctggcggcaatggcacagcacagaagatgtttaacagttttcatcatcattactcaaggtggaattgtgtcgcagtataccgccagaaacggggattaatactctttacctgttacccggctacggtagctatcccagttgaagatcacccacaaactgttacccaggcgcatacggtccatcacgcgttcgcccagcaacttggtcatctcttccatattactgttggtcagcatcccggttgggcgtttggaagaagagcggcgatcgacgatctggttgatgatcactttttcgtatttgctttcggtctgcacgccgatctcatcgatcaccagcagatcaacgttgctcagatcgttaagcagttgttcttcgctggtaccgctattcctgaaggtatctttcatcgcgctcataatatcggccacggtgatgatcaatacggatttaccgcgtagcagcagctcgttgcagattgccgccgccagatggtttttgccggttcctggcttaccagaaaagatgaagctggcgatgttgccgtcaaactcttcgacatactggcgcgctttgcttaacgcattcatctgcccttcacactcaacgcgatagttctcaaaggaacagttctgatgcagtggacgaataccggagcggttaaaggtgcgctgcattttcatcgcccgattttcacgttcgagagcggcggagcggatcgctccttgttctttttgccaggccagtagttcttcacccgttttgaatgcgggtttgatatgggcaggcatcattttttgcaggcgttgcatcaggtcgccaacgtttttcatcgttaccctctgaatcctggtggaatttggctgtcaggttcgctgaccgtattcacatctcgtttcggcagtccgccgttgctggcacgaccgatttgcaggctgcgcgccagtttttgttgccactgcacatggtgaaagactttaccttccgcctgccagtaggcaatgaaactggccagttcttcggtggtcaccggctctcttagcgccacgccccatagcgccgccaggcggataaaatcggcatcgggttgccagtccggatacatggcgaatttccccatgggtacagcaacgggagcggcttgcggttcctgatagagttgatcgtccagagcgacatcgcttcccggacgcgccagcttttcttccagcgccagcagttcagccaggcgtgcaggcgtgacggcataaaacgccggggcattgttagcaaatacggcaaccacaccgccttcagcttttgccagaacggtttggtgatcgtgtaccagggcgtcaataccaacgacgtccggggtcaaaactctggaagacatactgtttctcaaatatggaacgatgaacgagaagggagataacttttatagtaacacacggaggagaggaggctgtctctcatccgtgtgcttaagcgaggcaattttatacgcgagggcgcttgcggtacaaccataatccaggaatggaaagaccgatggataacgcaccaacaatgctactagctgtaagaaagttggttaacagggtaatcatcaacggttcgctgtaacctaactggctgatttttaccgcgctaatcattgcggtataagcgcttatgcccgggaacatagggataacggccgccacggtaaacactttcggatgcgccagataccagcggctccattgaataccaatggtaccgaccagcatagaagccataaaggtactccactcaatattcaacccgctggtcatcaagatcattcgggaaccatgacctatcgagccaagcagcgcacaccagcgtaacgcccgcacgggaacgttgaacaccatcgcaaagccgaccgcaggaatggcggcgaggatcatatcctgcgccaacgctaacagaaattcgatcacacccatccgcgtagcccccaaatcgtcagtgccatcactacgccgacgcaggtagccagtgtcagcagactggcgatcgcccagcgtgccagtccggtattgatgtggcctttaaacatatcggcgacggcattaatcaacggaaagcccggcactagcagcagaacgctggcggccatcgcaatggtgggggtattgctgaaagtggggagttgcaaaagcaatccggaaatggtggtggcggcgaaagcggtaaggcaaaagttgatctgtggatgaagatgacgttgtgccagcagctggcggatatacatcgcggtcgtactggcaaagaaggtgatgacggcaccatcccagccaccgttattgagtttacagaaacaggcgcaagaaaggccaaccattaaggctaccagccatcttgggtaacgtaatggctgaatttggctaaatcgtttctctacgcctttgtaatccagcagatgatgctccgcaagaatcacaatgtgctggacttcagtcaccacatgcatattaatgccgcgatcgtgatttttacgtgtgcttgtcaggcattgcccatctttaatagttgtcagcactatggcgttgctagagatagaactttcgacgctgtccattcccagtgcccgacccagtcgactggaaagctcatcaaccaacgcgctttccgcaccatgttgcaaaagaaataatccacactggatacaaagccgtgttacggctcgctgttgctcagtttgcataactcgccctttgtcatagacgtgctgcgtattgttcagataatgagaatccatttgtatcatgaagcacggttgttttgcggtaggttaagatcaaaattgcgctgattaatcctggttatcgggagaagctcggtgataaaaagcgaattatctctcgccgcaaacaaactatcacatgaatattatcatcataatgaatttattgtttggcctttacgaatcaggataatagataaccgggcacgttttttaatgttaacaagctaaaaccatcagatttcattgaataaatattggttgtgtgattttgcattctgcgggaagggatatcatttaattataaattaaatgaatgtgatttctgtttttcattaagtattcctaacaacttaatgtagatattttaaatgtctccaggctatttcaccaggttatcatttgatgctaaccttctgacacatgcagtggagttgttgtgcagcaggagtatgctgatatgaaagtgaatgctaaggataatttattcgcttaatctattaatttgctggaaacatttaaggaatgaatatcctgaataaaccatcataatttttagacagtggatgtggaggaaatatgttgccaggatgctgcaaaaatggaattgttatcagtaaaatacctgttatgcaagcagggttaaaagaggtcatgaggactcacttccctgaatatgaaataatatccagcgcctctgcggaggaccttaccttattacaattacgtcgttccggattagtcattgctgatttagccggtgaaagtgaagatccacgttctgtttgtgaacattattattctttaatcagtcaatatcgggaaattcactgggttttcatggtgagtcgctcctggtattcccaggcagtagaactgctcatgtgccctacggcgacgttattgtctgatgttgaacccattgagaatctggtcaagaccgtacgttccggcaatacgcacgcagagcgtatcagcgccatgctgacctccccggcaatgactgaaactcatgattttagctatcgctccgtcattctcactcttagtgagcgcaaggtactgcggctattaggtaaaggatggggcatcaaccagatagctagtttgcttaagaaaagtaataaaactatcagcgcccaaaaaaacagtgcgatgcgtcgactggcaattcacagcaacgctgaaatgtatgcatggataaatagcgcgcagggtgcaagagaacttaacttgccttctgtttatggagatgccgcagaatggaacacagccgaattaagaagagaaatgagccacagttaaaaaaatgcgtcatgagtagtatcggtattgagagtttattcagaaagtttgcgggtaacccttataagctccatacctataccagtcaggagagttttcaggatgccatgagccggatcagctttgcggcggtcattttttctttttctgccatgagaagtgagcgcagagagggattatcttgcctgactgaactggcgattaagtttccgcgtacccggcgtttagttattgcggatgatgatattgaagctcggctgattggtagtttgagcccaagtccgctggacggtgtattaagtaaagcgagtacgctggagatttttcatcaggaactctttttgagtttaaatggtgtacgtcaggcgaccgaccgactgaacaatcagtggtacattaaccaaagccggacgttaagcccgacggagagagaaatattgcgctttatgagccgtggctacagtatgacacaaattgccgagcagcttaaacgcaatatcaaaacgatccgtgcacataaatttaatgtgatgagcaaactgggcgtcagttctgacgcagggttgttggaggccgcagatattctgttatgtatgcggcattgcgaaacaagtaatgtgttgcatccctattaatccgcatgatgccgggtttacttccccggcagtgctttcatttcagcgtacaatcgccacattgctgcacatccggtaagcgataacgctggcagcaagtgcggcgcaccagcaggccgtcgcgcagtaccacggtacgccagagtggattatcttcaccgttcgtgagcgttttctcaaaaaagagggcatggcgcaggctttcaacagtagcctcgccgagcagttgcttcatctcagtgagataccagttgatcaaataaccggtattactccagataagtttgccgttgatctctccggtcgcttctagtgcttgcacaaccggaaccagcgcctggctgattaacgtttccattcgatgctgcgggctatgtggtgttgcgtttttatcttcacacacatcgacccagaaacaggcgacgcgtccggtttcgtgaaactcagcatggaaatgttccgggctcacatctaatgccttttcctgcgtcagtagcgccagcattaatggtggcaccatcaggccgatataccattgtgcccatagactgatcagcggtttgttctcgcggatcatcatcggttggttgcgatagatatgatcggaatagaccgccagcagagaacttagcacattcggactactccattgcgccagcgtcatggcgttaagtggggcaggttcatccaggcggataaactccagcaaatgttcacgatgttttgcgatcgtcgcccgcacggcttgcgcaagcgtgggatcctgcggctggagatgcgttcgccagatgacatcttcatagagcggtgcggaacgataggccataatcgggatagtaatctaaatgataatgattgctaatcatagcgataggtttacccgatagcaagggatttatctggcttgcaaatgataaaaattatcatatgatattggttatcattatcaatgaaagagatgaaatcatgttgcaacgtacgctgggcagtggctggggagtgttgctgccgggattgctgattgcggggctgatgtatgcggatttaagcagtgatcagtggcggattgtcattctgatgggattagtattgacgccgatgatgctgtatcacaaacagttgcggcattacattttgctaccaagctgcctggcacttattgctggcatcatgctgatgataatgaatttgaatcagggatgaaaaatcaaggaagaaacaagaaaggaagtaaagataattggtgcgaggggggggacttgaacccccacgtccgtaaggacactaacacctgaagctagcgcgtctaccaattccgccaccttcgcacagtcatcttactttttttgatatcgcctcgtttggtgcgaggggggggacttgaacccccacgtccgtaagaacactaacacctgaagctagcgcgtctaccaattccgccaccttcgcccagtgcgagcaatatcaacgtggtttttggtgcgaggggggggacttgaacccccacgtccgtaaggacactaacacctgaagctagcgcgtctaccaattccgccaccttcgcataccatcaattcttaaaaagaattgctaccacggaggcgcattctagtggttttcagcttttcgtcaatagttaattatcgacagaggtgtaattgctggaaaaatgtccatcaggaaactagcgtgcaggtttggtatgcatgcgggggcagatgccagatgcgacgctggcgcgtcttatctggcctacgaagggctaacgtgcaggttttgtaggtcggataaggcgttcacgccgcatccgacacggtattcggcgagataattaacctttcttcgcctggcgggtcataatggcgcgatacaccttgaagcgccctgtttgcgcgatcacttcgtggaagccaaatgtctcatccagcacgtccggataaggcaggaaggcgttcgctacaattcgcagctcgccgccgctattaagatgacgcaccgcaccgcgaatcagcgtttgcgccgcatccaggctggtttgcatcccatcgtggaacggcgggttggagatgatcatatcaaaacgacctttcacctcggaaaagacgttgctggcaaagacttcaccttcaacaccgttggccgcaagtgttgcgcggctggcttctaccgccggggcagagacatcgcacaaggtgagacgaattttcgggctatggcgcgcaaaggcaacactaagcacgcccgcgccacagccgacatccagcactttacctttcgtgtgcggagttaacgtgctgagcagcaactggctaccgacatccagaccgtcgcggctaaacacgccaggcagcgttttgaccgtcaggccatcgacgctgtattcgccccagaatttctccgcatcaaataccggctgtttttccagacgaccaaaatagaggccacagcgacgagcgctgtcgactttattcaacggcgcataatctgccagcatctgctcggcgctgcgcacgccgctgcggttctcgccaacgacaaaaatatctgtccccactggcagcagagaaagtaaattcatcaactggaactgggcttccggtttgttcttcggccagtagtaaatcagcgtatcgcaatctgcgacgtcatccgccgtggcgaccagactgaaacgggcgttatcccccatctggcggcttaatacctgccagtggtggaattgctgggtatgagcacggctggccgcggtatctaaacgcgcgggcaggtcatcctgtaagtctccggcaaacagaatacggctttgttcgaaatcatcactgtgacgcagcaagacttcacttgccggggtaaatgcagacatggaatgctcctcaattgatactggcggcgattatagccatatgttggcgcggtatcgacgaatttgctatatttgcgcccctgacaacaggagcgattcgctatgacatcccgacgagactggcagttacagcaactgggcattacccagtggagcctgcgtcgccctggcgcgttgcagggggagattgccattgcgatcccggcacacgtccgtctggtgatggtggcaaacgatcttcccgccctgactgatcctttagtgagcgatgttctgcgcgcattaaccgtcagccccgaccaggtgctgcaactgacgccagaaaaaatcgcgatgctgccgcaaggcagtcactgcaacagttggcggttgggtactgacgaaccgctaagtctggaaggcgctcaggtggcaagtccggcgctcaccgatttacgggcaaacccaacggcacgcgccgcgttatggcaacaaatttgcacatatgaacacgatttcttccctcgaaacgactgatttaccggcggcttaccacattgaacaacgcgcccacgcctttccgtggagtgaaaaaacgtttgccagcaaccagggcgagcgttatctcaactttcagttaacgcaaaacggcaaaatggcggcgtttgcgattacgcaagtggtgctggatgaagctacattgttcaatattgcggtcgatcctgactatcagcgtcagggattgggaagggcgctgctggaacatctgatcgacgaactggaaaaacgcggcgtggcgacactatggctggaagtccgtgctagtaacgctgccgccattgccctgtacgaaagtttaggctttaacgaggcgacgattcgccgcaattactaccccaccacggacggtcgcgaagacgccatcatcatggcgttgccaatcagtatgtaatacaaggtggaataatgaagtgggactggattttctttgatgccgatgaaacgctgtttacctttgacagtttcaccggcctgcagcggatgtttcttgattacagcgtcacctttaccgctgaagattttcaggactatcaggccgttaacaagccactgtgggtggattatcaaaacggcgcgatcactagtttacagcttcagcacgggcggtttgagagctgggccgaacggctgaacgtcgagccaggtaaactcaacgaagcctttattaatgcgatggcggaaatctgcacgccgctgccgggcgcggtttctctgcttaacgccattcgtggcaacgccaaaatcggcatcatcaccaacggctttagtgccttgcaacaggtgcgtctggaacgcacgggcctgcgtgattacttcgatttgctggtgatttccgaagaagttggcgttgccaaaccgaataagaaaattttcgattatgcgctggaacaggcgggcaatcctgaccgtagtcgcgtgctgatggttggcgacactgccgagtccgatattctcggtggcatcaacgccgggcttgcgacctgctggctgaatgcacaccatcgcgagcaaccagaaggcatcgcgcccacctggaccgtttctagcttgcacgaactggagcagctcctgtgtaaacactgattgcctcccccccgttgatgggtaaaatagccgcaatttttcgttttcaacaagcgcggcgcgatgccgcttactcaagaagaaagaattatgacgttgtctccttatttgcaagaggtggcgaagcgccgcacttttgccattatttctcacccggacgccggtaagactaccatcaccgagaaggtgctgctgttcggacaggccattcagaccgccggtacagtaaaaggccgtggttccaaccagcacgctaagagcgactggatggagatggaaaagcagcgtgggatctccattactacgtctgtgatgcagtttccgtatcacgattgcctggttaacctgctcgacaccccggggcacgaagacttcagcgaagatacctatcgtaccctgacggcggtggactgctgcctgatggttatcgacgccgcaaaaggtgttgaagatcgtacccgtaagctgatggaagttacccgtctgcgcgacacgccgatcctcacctttatgaacaaacttgaccgtgatatccgcgacccgatggagctgctcgatgaagttgagaacgagctgaaaatcggctgtgcgccgatcacctggccgattggctgcggcaagctgtttaaaggcgtttaccacctttataaagacgaaacctatctctatcagagcggtaaaggccacaccattcaggaagtccgcattgttaaagggctgaataacccggatctcgatgctgcggttggtgaagatctggcacagcagctgcgtgacgaactggaactggtgaaaggcgcgtctaacgagttcgacaaagagctgttccttgcgggcgaaatcactccggtattcttcggtactgcgctgggtaacttcggcgtcgatcatatgttggatggcctggtggagtgggcacctgcgccgatgccgcgtcagactgatacccgtaccgtagaagcgagcgaagataaatttaccggcttcgtatttaaaattcaggccaacatggacccgaaacaccgcgaccgcgtggcgtttatgcgtgtggtgtccggtaaatatgaaaaaggcatgaaactgcgccaggtgcgcactgcgaaagatgtggtgatctccgacgcgctgacctttatggcgggtgaccgtagccacgttgaagaagcgtatccgggcgatatcctcggcctgcacaaccacggcaccattcagatcggcgacacctttacccagggtgagatgatgaagttcaccggtattccgaacttcgcaccagaactgttccgtcgtatccgcctgaaagatccgctgaagcaaaaacagctgctcaaagggctggtacagctttccgaagagggcgcggtgcaggtgttccgtccaatctccaacaacgatctgatcgttggtgcagttggtgtgctgcagtttgatgtggtggtagcgcgcctgaagagcgaatacaacgttgaagcagtgtatgagagtgtcaacgttgccactgcccgctgggtagaatgtgcagacgcgaagaaattcgaagagttcaagcgtaagaacgaaagccaactggcgcttgatggcggcgataacctcgcttacatcgctaccagcatggtcaacctgcgcctggcacaggaacgttatccggacgttcagttccaccagacccgcgagcattaattcttgcctccagggcgcggtagccgctgcgccctgtcaatttcccttccttattagccgcttacggaatgttcttaaaacattcacttttgcttatgttttcgctgatatcccgagcggtttcaaaattgtgatctatatttaacaaagtgatgacatttctgacggcgttaaataccgttcaatgcgtagatatcagtatctaaagccgtcgattgtcattctaccgatattaataactgattcagaggctgtaatggtcgttattcatcactcatcgcttttgtgatggcgaccattgacttctgtagagggtgaagtctctccctattcagcaatgcaacctcgtgttgccaggctcaaattacgagcaaacatacaggaataaatcgatgactatgacaagactgaagattagcaaaactctgctggctgtaatgttgacctctgccgtcgcgaccggctctgcctacgcggaaaacaacgcgcagactaccaatgaaagcgcagggcaaaaagtcgatagctctatgaataaagtcggtaatttcatggatgacagcgccatcaccgcgaaagtgaaggcggccctggtggatcatgacaacatcaagagcaccgatatctctgtaaaaaccgatcaaaaagtcgtgaccctgagcggtttcgttgaaagccaggcccaggccgaagaggcagtgaaagtggcgaaaggcgttgaaggggtgacctctgtcagcgacaaactgcacgttcgcgacgctaaagaaggcagcgtgaagggctacgcgggtgacaccgccaccaccagtgaaatcaaagccaaactgctggcggacgatatcgtcccttcccgtcatgtgaaagttgaaaccaccgacggcgtggttcagctctccggtaccgtcgattctcaggcacaaagtgaccgtgctgaaagtatcgccaaagcggtagatggtgtgaaaagcgttaaaaatgatctgaaaactaagtaattcgtcgtaattcgtcctcccgaactttgtcgggaggcgcgatgtgcaccacactaaaaatatcgcattgagtgattttcacgctcatatcaagcggtgacattaactatggtaaaggagacgcttatgtttcgttggggcatcatatttctggttatcgcgttaatcgccgccgcacttgggtttggtggtctggccggtaccgctgcaggcgcagctaaaattgtctttgtcgtcgggattattctgttcctggtgagtttgttcatgggccgaaaacgaccctaaatttcagaccattaagaaaattttatccaaagccagtccagcggactggcttttgcggttttagcgaataataaattgcgttactttgtcattctttcacaacaaaaacaggaaggcagaggtggggcagcgaatacctgtaacgcttggtaatattgcgccgttgagcctaaggccgttccagcctggacgaatagctctggtgtgcgaaggcggcggacagcgtggaattttcacggctggcgtgctggatgagtttatgcgcgcgcagtttaatcctttcgatctttatctcggcacatctgccggggcgcagaacctcagcgcgtttatctgcaatcagcccggttacgcgcgcaaagtcatcatgcgctataccacaaaacgcgaatttttcgatccattgcgctttgtccgtggaggaaatcttatcgatctcgactggctggtggaggccactgcaagccagatgccgttgcaaatggataccgccgcgcggttgtttgacagcggcaaaagcttttatatgtgcgcctgtcgtcaggatgactacgcgccgaattactttttaccaaccaaacaaaactggctggatgtgattcgcgcctccagtgcgatacctggcttttatcgtagcggagtgagcctggaaggcattaactacctggatggcgggatcagtgatgcgattccggttaaagaggcggcaaggcagggcgctaaaacgttggtcgtcattcgcactgtgccgagtcaaatgtactacacgccgcagtggttcaaacgcatggaacgctggctgggtgacagtagcctgcagccgctggtcaatctggtgcagcatcatgaaaccagctatcgtgacattcagcaatttattgagaaaccaccgggcaagctgcggatattcgaaatttatccgccgaagccattacatagtatcgcgcttggcagtcggattccggcgctgcgtgaagactataaacttgggcgtttatgcggtcgttatttcctcgccacggttggcaagctattaactgaaaaagcgccgcttacccgccatctggtgccagtggtgacgccggaaagcattgtcattccgcctgcgccagtcgccaacgatacgctggttgccgaagtgagcgacgctccgcaggcgaacgacccgacatttaacaatgaggatctggcttgatttgccgttttatcgacacccactgccattttgatttcccgccgtttagtggcgatgaagaggccagcctgcaacgcgcggcacaagcgggcgtaggcaagatcattgttccggcaacagaggcggaaaattttgcccgtgtgttggcattagcggaaaattatcaaccgctgtatgccgcattgggcttgcatcctggtatgttggaaaaacatagcgatgtgtctcttgagcagctacagcaggcgctggaaaggcgtccggcgaaggtggtggcggtgggggagatcggtctggatctctttggcgacgatccgcaatttgagaggcagcagtggttactcgacgaacaactgaaactggcgaaacgctacgatctgccggtgatcctgcatagtcggcgcacgcacgacaaactggcgatgcatcttaaacgccacgatttaccgcgcactggcgtggttcacggtttttccggcagcctgcaacaggccgaacggtttgtacagctgggctacaaaattggcgtaggcggtactatcacctatccacgcgccagtaaaacccgcgatgtcatcgcaaaattaccgctggcaagcttattgctggaaaccgacgcgccggatatgccgctcaacggttttcaggggcagcctaaccgcccggagcaggctgcccgtgtgttcgccgtgctttgcgagttgcgccgggaaccggcggatgagattgcgcaagcgttgcttaataacacgtatacgttgtttaacgtgccgtaagccggataaggcgttcacgccgcatccggcagttggcgcacaatgcctgatgcgacgcttaacgcgtcttatcatgcctacaggtttgtgccgaaccgtaggccggataaggcgttcacgccgcatccggcagttggcgcacaatgcctgatgcgacgcttgtcgcgtcttatcatgcctacaagtctgtgccgaaccgtaggccggataaggcgttcacgccgcatccggcagtcggcgcataatgcctgatgcgacgcttgtcgcgtcttatcatgcctacaggtttgtgccgaaccgtaggccggataaggcgttcgcgccgcatccggcagttggcgcacaatgcctgatgcgacgcttgacgcgtcttatcaggcctacaagtctgtgccgaaccgtaggccgtatccggcatgtcacaaatagagcgccggaaatatcaaccggctcaccccgcgcacctttaacgcatcagccaacggctcaacgtcttccggcgtggcgctcgcccagctttgcgcctcgccatacacgccgtgggcatgaaacgcgttcaggcgtaccggaacatcgccgagtcccttgataaacgccgccagttcttcgatgtgttgcaaataatccacctggccagggatcaccagcaaacgcagttccgccagcttgccgcgctctgccagcaaatagatgctgcgcttaatctgctgattatcgcgtccggtgagttgttgatgacattcgctcccccacgctttgagatcgagcattgcgccgtcgcacaccgggagcaatttttcccagccggtttcgctcaacatgccgttactgtccaccagacaggtgagatggcgcagttgcggatcgtttttgatagcagtaaacagcgccaccacaaacggcagctgggtcgtggcttcaccgccactcaccgttatcccttcgataaacagcactgctttgcggacatggctaagcacttcgtccacgctcatggattgcgccatgggcgtggcatgttgcggacacctcttcaggcaggtatcacactgctcgcaaaccacagcgttccacaccactttgccgtcaacaatctgcaacgcctgatgcggacactgtggcacgcactccccacagtcattgcaacgtcccatcgtccacggattgtgacagtttttgcagcgcagattgcagccctgcaaaaacagagccagacgactgcctggcccgtcaacgcaggagaaggggataatcttactgactaaagcgcatctgctgttcatggcttatcacgcgcggctggcgttccagaatacgagtgttgcgtgcggcttcttcgcccagccaggtggtgttggtgcgactaccttcggcgcgatatttttctaaatcgctcaaacgcaccatataaccggtaacgcgaaccagatcgttaccgctgacattggcggtaaattcacgcattccggctttaaaggcaccgaggcaaagctgtaccagtgcctgcgggttacgtttgatggtttcgtcgagcgtcagaatgtcgctgatgccggaataataataagcatgatgcggggcgacagtttgcagatgggtgatcggatctggctcatcgccatacggcaaacgcgcgcccggcgtggtgccgatatcggaactgatcccgctctgtgcgtgtaacatggcgcgtttttgccagccatatttcacgggggtattggcgacaaactccgccagttgcgcgctgatgcgataacctacttcatttgcggcggcttctttaccgtagcgcgcggcaatcccttctttttcacacagcaagttaaccgcttccgccagcccatacatgccaaacattggcacaaaacgttcagggttaatcagcccttctttcaccaggaagctattctcaaagaagtgactttgttgatagaggaattcacaccgcgcatcgatgatggcgatctgctgctggcagtagtgcggtagagtgcgcgtaaagaagtcatccaggctttcgctgcgctcggcaatggctttcaggttaaggcgtaccagcgtgctgccaccacccgccagcggcagactgttgtaacagctcacaatcccgtagcccccttttgtgaaaattttatcatgcaccggaccgttggcgatgtgcggtttgctacattcacagatgttcttcgccacttccagcagcaggtcatcaggggtgatttcaggatcgtagataaaggtcaggttcggactaacctgcttcaactctgcatctgcacgtaagatcgcgcgggtaatggggctatcagacgggccgatattggcgtgcataaaggcgtctggcagggttctgtcgaggtaacgccagaaacgttttattcgaacatcgatctcgtcttgtgttagaattctaacatacggttgcaacaacgcatccagttgccccaggtagaccggcatgcttgtgacgctcggtacgtggtggtaaagaatggtcagcagagagagtgcgtcatcaagatctttcgcgccttccagctccagccattcggaaccgttcgccagaaaacgggcgtaatcgggtaagacatagcgcggtttgtacggcgcatgaccttcaaacatatcgcagattacaccttcatccagcgcgcggcgggcttcggcaggaagctgtgggtaaggcagattgttttctgcttccagtgccagaaaatggcgcttctgctccgggctaagcactgggctggtgacaatttgctggcaacgttgttgcagtgcattttcatgagaagtgggcatcttcttttccttttatgccgaaggtgatgcgccattgtaagaagtttcgtgatgttcactttgatcctgatgcgtttgccaccactgacgcattcatttgaaagtgaattatttgaaccagatcgcattacagtgatgcaaacttgtaagtagatttccttaattgtgatgtgtatcgaagtgtgttgcggagtagatgttagaatactaacaaactcgcaaggtgaattttattggcgacaagccaggagaatgaaatgactgatctgaaagcaagcagcctgcgtgcactgaaattgatggacctgaccaccctgaatgacgacgacaccgacgagaaagtgatcgccctgtgtcatcaggccaaaactccggtcggcaataccgccgctatctgtatctatcctcgctttatcccgattgctcgcaaaactctgaaagagcagggcaccccggaaatccgtatcgctacggtaaccaacttcccacacggtaacgacgacatcgacatcgcgctggcagaaacccgtgcggcaatcgcctacggtgctgatgaagttgacgttgtgttcccgtaccgcgcgctgatggcgggtaacgagcaggttggttttgacctggtgaaagcctgtaaagaggcttgcgcggcagcgaatgtactgctgaaagtgatcatcgaaaccggcgaactgaaagacgaagcgctgatccgtaaagcgtctgaaatctccatcaaagcgggtgcggacttcatcaaaacctctaccggtaaagtggctgtgaacgcgacgccggaaagcgcgcgcatcatgatggaagtgatccgtgatatgggcgtagaaaaaaccgttggtttcaaaccggcgggcggcgtgcgtactgcggaagatgcgcagaaatatctcgccattgcagatgaactgttcggtgctgactgggcagatgcgcgtcactaccgctttggcgcttccagcctgctggcaagcctgctgaaagcgctgggtcacggcgacggtaagagcgccagcagctactaagtaagatgctttacgcctgatgcgctgcgcttatcaggcctacgagacgtatctacccgtaggccggataaggcgtagacgcatccggcaaaagccgcctcatactcttttcctcgggaggttaccttgtttctcgcacaagaaattattcgtaaaaaacgtgatggtcatgcgctgagcgatgaagaaattcgtttctttatcaacggtattcgcgacaacactatctccgaagggcagattgccgccctcgcgatgaccattttcttccacgatatgacaatgcctgagcgtgtcagcctgaccatggcgatgcgagatagtggaaccgttctcgactggaaaagcctgcatctgaatggcccgattgttgataaacactccaccggtggcgtcggcgatgtgactagcctgatgttggggccgatggtcgcagcctgcggcggctatattccgatgatctctggtcgcggcctcggtcatactggcggtacgctcgacaaactggaatccatccctggcttcgacattttcccggatgacaaccgtttccgcgaaattattaaagacgtcggcgtggcgattatcggtcagaccagtagtctggctccggctgataaacgtttctacgcgacccgtgatattaccgcaaccgtggactccatcccgctgatcaccgcctctattctggcgaagaaacttgcggaaggtctggacgcgctggtgatggacgtgaaagtgggtagcggcgcgtttatgccgacctacgaactctctgaagcccttgccgaagcgattgttggcgtggctaacggcgctggcgtgcgcaccaccgcgctgctcaccgacatgaatcaggtactggcctccagtgcaggtaacgcggttgaagttcgtgaagcggtgcagttcctgacgggtgaatatcgtaacccgcgtctgtttgatgtcacgatggcgctgtgcgtggagatgctgatctccggcaaactggcgaaagatgacgccgaagcgcgcgcgaaattgcaggcggtgctggacaacggtaaagcggcagaagtctttggtcgtatggtagcggcacaaaaaggcccgaccgacttcgttgagaactacgcgaagtatctgccgacagcgatgctgacgaaagcagtctatgctgataccgaaggttttgtcagtgaaatggatacccgcgcgctggggatggcagtggttgcaatgggcggcggacgccgtcaggcatctgacaccatcgattacagcgtcggctttactgatatggcgcgtctgggcgaccaggtagacggtcagcgtccgctggcggttatccacgcgaaagacgaaaacaactggcaggaagcggcgaaagcggtgaaagcggcaattaaacttgccgataaagcaccggaaagcacaccaactgtctatcgccgtatcagcgaataacggtatactgatctgatcatttaaatttgaagcactgagtacggagaacatatgaaacgtgcatttattatggtgctggacagtttcggcatcggcgctacagaagatgcagaacgctttggtgacgtcggggctgacaccctgggtcatatcgcagaagcttgtgccaaaggcgaagctgataacggtcgtaaaggcccgctcaatctgccaaatctgacccgtctggggctggcgaaagcacacgaaggttctaccggtttcattccggcgggaatggacggcaacgctgaagttatcggcgcgtacgcatgggcgcacgaaatgagttccggtaaagataccccgtctggtcactgggaaattgccggtgtcccggttctgtttgagtggggatatttctccgatcacgaaaacagcttcccgcaagagctgctggataaactggtcgaacgcgctaatctgccgggttacctcggtaactgccactcttccggtacggtcattctggatcaactgggcgaagagcacatgaaaaccggcaagccgattttctatacctccgctgactccgtgttccagattgcctgccatgaagaaactttcggtctggataaactctacgaactgtgcgaaatcgcccgtgaagagctgaccaacggcggctacaatatcggtcgtgttatcgctcgtccgtttatcggcgacaaagccggtaacttccagcgtaccggtaaccgtcacgacctggctgttgagccgccagcaccgaccgtgctgcagaaactggttgatgaaaaacacggccaggtggtttctgtcggtaaaattgcggacatctacgccaactgcggtatcaccaaaaaagtgaaagcgactggcctggacgcgctgtttgacgccaccatcaaagagatgaaagaagcgggtgataacaccatcgtcttcaccaacttcgttgacttcgactcttcctggggccaccgtcgcgacgtcgccggttatgccgcgggtctggaactgttcgaccgccgtctgccggagctgatgtctctgctgcgcgatgacgacatcctgatcctcaccgctgaccacggttgcgatccgacctggaccggtactgaccacacgcgtgaacacattccggtactggtatatggcccgaaagtaaaaccgggcagtctgggtcatcgtgaaaccttcgcggatatcggccagactctggcaaaatattttggtacttctgatatggaatatggcaaagccatgttctgatggatttgggcggagcgttgactccgcctttgttatgtcacaaaaaggataaaacaatggctaccccacacattaatgcagaaatgggcgatttcgctgacgtagttttgatgccaggcgacccgctgcgtgcgaagtatattgctgaaactttccttgaagatgcccgtgaagtgaacaacgttcgcggtatgctgggcttcaccggtacttacaaaggccgcaaaatttccgtaatgggtcacggtatgggtatcccgtcctgctccatctacaccaaagaactgatcaccgatttcggcgtgaagaaaattatccgcgtgggttcctgtggcgcagttctgccgcacgtaaaactgcgcgacgtcgttatcggtatgggtgcctgcaccgattccaaagttaaccgcatccgttttaaagaccatgactttgccgctatcgctgacttcgacatggtgcgtaacgcagtagatgcagctaaagcactgggtattgatgctcgcgtgggtaacctgttctccgctgacctgttctactctccggacggcgaaatgttcgacgtgatggaaaaatacggcattctcggcgtggaaatggaagcggctggtatctacggcgtcgctgcagaatttggcgcgaaagccctgaccatctgcaccgtatctgaccacatccgcactcacgagcagaccactgccgctgagcgtcagactaccttcaacgacatgatcaaaatcgcactggaatccgttctgctgggcgataaagagtaattgtgtttcgctgcaaggcgattgccttgtgaagccggagcgggagactgctccggctttttagtatctattcatttttctctccagcttgaatattttcgctatacttttcagtgaaatgtgttaataaatctattcaagtatctattcacgaatctattcattaatgagcgagctgactgatcttttactgcaagggccgcgttctgccccggaattgcgccagcgtctggcaatcagtcaggcgacgttcagtcgccttgttgccagagaagatcgggtgattcgctttggtaaagcacgggcaacgcgatatgcactgctgcgtccttatcgcggaattgagcgtattcccgtctggcgggtggacgataccggaaaggcgcataaattcgccgacatccggttgtgctggccgcagggaagttgtctggtaacaggcgcagatggcgacgaacagtggtttgatggtttgccctggtatttgaccgatctccgaccgcagggctttttagggcgcgcgtggggcaggaagttagccgcgcaactgaatctgactgatgatatacgtctctggcaggaagaagatgtgctctacgccctgaccgtatttaacggtgaatatactggcggttggttggtcggggaggggaattatcagcgatggattactgcacaacaccctgcggaaattcctctggatcaaaaactcacccattacgaacagctggcaagtgatgcactggcaggagaaattgtgggttcttctgcgggcggcgagcagccaaaatttacctactatgcacaaacgccgagtggcaataaacatgtgttggtgaaattcaccgtaccacagcaaaccgcggtcagccaacgttggggtgacctgctaattgctgaatctattgccgcgcaaatcctgcgtgacggtgggatccacgccatcgagagtacggtgcttgtaacaagtaacaggcaggtattcctcgaagcggaacgctttgactgcaaaggtaacgatggtcgcttgcctattgtgagcctggaggcggtgcagagtgagtttatctcttctccgggaagctggccgcaggcaatgcgccgtttgtgtgagcaacaacttgtcactcaccagagcgtggcgcaaacagaagtgatctgggcatttgggcgacttatcgccaacagcgatatgcacgcaggtaatttaagcttttatttatctgaaccgccatttgcgctgacgcccgtctacgacatgctgccgatggtctatgcaccaaacagcgctggaatgctgcgtgatgctgccattgaggtgaagtttgatcttaacgtcagtaaaagcgcttggttaacggcgatcccgctggcgcagcagttctggcaaacggtcgccagagatccgcgtatcagcgaggcgtttcgccacattgcgcaagaaatgccggaaaaaatccggcaaatcgaagagaaagttgcccgcatgggcgggtaattaccttacagcccccgccatccatgcgcttaactcccgtagctctttttcctgttccgggaagtcaaccaacagcgcttcgcactcctgttgcagcatatctgcgcggtacaggcagccttgcagtcgtccggcgagggcttccagcggcgcggggttgaggctgtcggtaaacacctgggcgcgggtgatatggcctttttcaacgtcgaaatgcagttccacgccgccccaggtaaagcgttcatccagcagatggctgaatgccggagcctgaccgaagttccattcccagctactctggcgggcaaaggtttcggcgaagtttggcaagtctggcgttttgttcggggagatgatttccgcttccacgcgctcgccataatgggcgaaaaaggcctcggttatggcctcgcaaacctgctcatgggtgatccccggcaacagctcggtgaggttggtcacgcgggaacgtacgctcgtaatgcctttcgccgccagtttctttttatccggattgagatagtttgccaggcggctgaggtcggcattgagtagcaaggtgccgtggtggaagccgcgatctttggtttcgcgataggcgctgccactgactttgcggtcgccttcgacggttttcaccaccagatcgttacgtccggacgcttcggcgctgacgccgagcgcgttcagcgcattgagcacaatgctcgtggagatagttttatcgtactccggcttgccagccataaaggtaaagcaggtattgccgagatcgtggaacaccgcgccgccaccgctactgcgccgcgccaggcggacgttatcttcttccatccgccgggtattacactctttccacgggttctgcgcgcgaccaattactaccgtgtcggcattgcgccagagaaacagaacgcgctgcgtggcgggcatttggcgaaaaatacactcttccaccgccaggttaaaccacgggtcgtaagagtcagagatgagcaggcgtaatgtggacataacgatttcctttcttgtagtaatgggtcactcttttttctcgctttcttcctcttccggcaccggtttgctggcggttaacaggaaggggctttgctgccagcgggtgcgtttaccctgtagcagcgtgcgggtcagcactacaccgattgccagactgagcagcaacatcaggcgtaaaatgttagtggtgttatccacctgttgggcttcggtggcgagcgtatgggtgtcgagtgtcaggcgcagatagccgagcggtccgtttttacccgcaattggctcgacaatctgctggttaaaatagccgcctgcttttttaccgtcgagcgccagccggtcgcgcacttcgacgctttcgccagaacgtgcgataagatcgccttgttcgtcatacacacccgcgtcgaggatacggctttcatccgttaactgatcgaggatcgcctgaatgcgtttttcatccggactgtcggtacgcatcagcggtgcaacgttcagcgtcacctgacgcgccagggtgcgggccagttcttccagctgtggattacgctgtcgctggtggttttgactaaaccaactcgctccctgcatcagcgccactaacaaggcaagacagaacaggacaatcactgcccgatgcagccggaatttcagttttgtgcgagccatcttccaccctttgaaaatttgagacttaatgttgccagaagcaatggatacaaggtagcctcatgcgttattttccctgcttcgaacgattttacaggagccttaatgcctaacattacctggtgcgacctgcctgaagatgtctctttatggccgggtctgcctcttagtttaagtggtgatgaagtgatgccactggattaccacgcaggtcgtagcggctggctgctgtatggtcgtgggctggataaacaacgtctgacccaataccagagcaaactgggtgcggcgatggtgattgttgccgcctggtgcgtggaagattatcaggtgattcgtctggcaggtagtctcaccgcacgggctacacgcctggcccacgaagcgcagctggatgtcgccccgctggggaaaatcccgcacctgcgcacgccgggtttgctggtgatggatatggactccaccgccatccagattgaatgtattgatgaaattgccaaactggccggaacgggcgagatggtggcggaagtaaccgaacgggcgatgcgcggcgaactcgattttaccgccagcctgcgcagccgtgtggcgacgctgaaaggcgctgacgccaatattctgcaacaggtgcgtgaaaatctgccgctgatgccaggcttaacgcaactggtgctcaagctggaaacgctgggctggaaagtggcgattgcctccggcggctttactttctttgctgaatacctgcgcgacaagctgcgcctgaccgccgtggtagccaatgaactggagatcatggacggtaaatttaccggcaatgtgatcggcgacatcgtagacgcgcagtacaaagcgaaaactctgactcgcctcgcgcaggagtatgaaatcccgctggcgcagaccgtggcgattggcgatggagccaatgacctgccgatgatcaaagcggcagggctggggattgcctaccatgccaagccaaaagtgaatgaaaaggcggaagtcaccatccgtcacgctgacctgatgggggtattctgcatcctcagtggcagcctgaatcagaagtaattgctcgcccgccatcctgcgggcggcacagcattaacgaggtacaccgtggcaaaagctccaaaacgcgcctttgtttgtaatgaatgcggggccgattatccgcgctggcaggggcagtgcagtgcctgtcatgcctggaacaccatcaccgaggtgcgtcttgctgcgagcccaatggtggcgcgtaacgagcgtctcagcggctatgccggtagcgccggggtggcaaaagtccagaaactctccgatatcagccttgaagagctgccgcgtttttccaccggatttaaagagttcgaccgcgtactaggcggcggcgtggtgccaggaagtgccattctgattggcggtaaccctggtgcggggaaatccacgctgctactgcaaacgctgtgcaaactggcccagcagatgaaaacgctgtatgtcaccggcgaagagagcctgcaacaggtggcaatgcgcgctcatcgccttggcctgccgactgacaatctcaatatgttgagcgaaaccagcatcgaacagatctgcctgattgccgaagaagagcaaccgaagctgatggtaattgacagcatccaggtgatgcatatggcggatgtacagagtagccctggtagcgtggcgcaggtgcgtgaaacggcggcttatttgacacgcttcgccaaaacgcgcggtgtggcgattgtcatggtggggcacgtaaccaaagatggtagcctggctggcccgaaagtgctggaacactgtatcgactgtagcgtgcttttggatggcgatgccgactcccgttttcgcaccttgcgcagccataaaaaccgcttcggcgcggtgaatgagctgggcgtcttcgcgatgaccgaacaggggctgcgtgaagtcagcaaccctagcgcaattttcttaagtcgcggcgatgaagtgacctccggtagcagtgtgatggtggtatgggaaggaacgcgtccactgctggtggagattcaggcgctggtcgatcacagcatgatggcgaacccacgccgcgtggcagtggggctggaacaaaaccgtctggcaatcctgctggctgtgttgcaccgtcacggtggtctgcaaatggccgatcaggatgtgtttgtgaacgtggtcggcggcgtgaaggtaaccgaaaccagtgccgacttagcgttactgctggcgatggtttccagcctgcgcgacagaccgctgccgcaggatctggtggtgtttggtgaagtcgggctggcaggggagatccgcccggtgcccagcggtcaggaacgaatctctgaagcggcgaaacacggttttcgccgggcgattgttccggcggctaacgtgccgaaaaaagcgccggaagggatgcagatttttggcgttaaaaaactctccgacgcgcttagcgtgttcgacgacttataatgagatatacggagggagatatgagcagttttgattacctgaaaactgccatcaagcaacagggctgcacgctacagcaggtagctgatgccagcggtatgaccaaagggtatttaagccagttactgaatgccaaaatcaaaagccccagcgcgcaaaagctggaggcgttgcaccgttttttggggcttgagtttccccggcagaagaaaacgatcggtgtcgtattcggtaagttctacccactgcataccggacatatctaccttatccagcgcgcctgtagccaggttgacgagctgcatatcattatgggttttgacgatacccgtgaccgcgcgttgttcgaagacagtgccatgagccagcagccgaccgtgccggatcgtctgcgttggttattgcaaacttttaaatatcagaaaaatattcgcattcatgctttcaacgaagagggcatggagccgtatccgcacggctgggatgtgtggagcaacggcatcaaaaagtttatggctgaaaaagggatccagccggatctgatctacaccagcgaagaagccgatgcgccacagtatatggaacatctggggatcgagacggtgctggtcgatccgaaacgtacctttatgagtatcagcggtgcgcagatccgcgaaaacccgttccgctactgggaatatattcctaccgaagtgaagccgttttttgtgcgtaccgtggcgatccttggcggcgagagcagcggtaaatccaccctggtaaacaaacttgccaatatcttcaacaccaccagtgcgtgggaatatggccgcgattatgtctttagtcacctcggcggtgatgagatcgcattgcagtattctgactacgataaaatcgcgctgggccacgctcaatacattgattttgcggtgaaatatgccaataaagtggcatttatcgataccgattttgtcaccactcaggcgttctgcaaaaagtacgaagggcgggaacatccgttcgtgcaggcgctgattgatgaataccgtttcgatctggtgatcctgctggagaacaacacgccgtgggtggcggatggtttacgcagcctcggcagtagcgtggatcgcaaagagttccagaacttgctggtggagatgctcgaagagaacaatatcgaatttgtgcgggttgaagaggaagattacgacagtcgtttcctgcgctgcgtggaactggtgcgggagatgatgggggagcagagataaccgtgatgaaactgctcaaaggcgaggtataaaatgagtttttttgatgagttgaaaacctctctggaagaggctgtcgagattaaacaaggtttgaaaaaacctgcacgggtgacccgccacgaaattgaggatgctaaggctgttgtagaccggaaacggtgttcacgccgcatccggcattcggtgctcaatgcctgatgcgacgcttaccgcgtcttatcaggcctacagttttacaacgtattgaaattgctggttttgtaggccggataaggcgttcgcgccgcatccggcattttacgcattacttcgcaatacgcttgtacttgatacgcttcggctccagcgcgtctgcgcccagcgtgcgtttcttgtactcttcgtactcggtaaagttaccttcgaagaactcaactttaccttcatcctggtaatccagaatgtgcgtggcgatacggtcgaggaaccaacggtcgtggctgataaccatcgcacagcccgggaactccagcagggcgttttccagcgcgcgcagggtttcgatatccaggtcgttggttggttcgtcgagcagcagcatgttgccgccaacctgcagcagcttcgccagatgcagacgaccgcgctcaccaccggagagttcaccaacgcgtttaccctgatcaacccctttaaagttaaagcggccaacgtaggcgcggcttggcatctcggtgttgccgatcttcatgatatccagcccgccggaaacttcttcccaaacggttttgctgttatccatactgtcacggaactgatcaacgctcgccagtttcaccgtttcacccaaagtgatggtgccgctgtccggctgttcctgaccagagatcatacggaacagggtgcttttacccgcaccgttcggaccgatgatcccgacgatcgctcctttcgggatgctgaagctcaggtcatcaatcagcagacgatcgccataggatttacgcaggttgctgacttccagcactttatcgcccagacgcggtccaggtggaataaacagttcgttggtttcgttacgtttctgatattcggtgctgttcagttcttcaaagcgcgccagacgtgctttacctttgctctgacggcctttagtaccttgacgtacccattccagctctttctcaatgctcttacgacgcgccgcttcttgactagcttcctgcgccaggcgctgatctttctgctccagccaggaggagtagttaccttcccacggaataccttcaccgcggtcaagttcgaggatccagcctgcaacgttatcgaggaagtaacggtcgtgggtaatcgccacaacggtgccttcgaagtcgtgcaggaagcgttccagccaggccacggattcggcatccaggtggttggtcggttcgtcgagcagcagcatgtctggtttttccagcagcaggcggcacaacgctacgcgacgacgttcaccaccggagaggttagcgattttcgcgtcccagtccggcagacgtagcgcatccgccgcacgctccagctgtacgttcagattatgaccgtcgtgagcctgaatgatctcttccagacggccttgttcagcggccagcttgtcaaaatcggcatccggatcggcgtacagcgcatacacttcatccaggcgtttcagggcgttaaccacttcactaaccgcttcttcaatggactcacgcacggtgtgttccgggttcagctgcggttcctgcggcagataaccaatcttgatgtctggctgcggacgcgcttcaccttcgatgtctttatcaatgcccgccataatgcgcagcagggtggacttacccgcgccattcagacccaggacaccaatttttgccccagggaagaaactcagagagatgtttttcaaaatatgacgtttcggcggaacaactttgccgacacgatgcatggtataaacgaattgagccacgttggacttcgcctctatgtttatcgtgataatgagttttcaaaggcgaagtgtagcctttttccccgcctaatcccagccggtcgatcaccctcgcagtaaaagtaaaaaagtgtccgtaacgtggcgtaaacggcaatgactggttagcataaatctattacgcggcatgacgctgcattgatgtatttacacttagaggatgcgcttgtggaaaaagccaaacaagttacctggcggctgttggctgccggtgtctgtctgctgacggtcagcagcgtggcgcgagccgacagtctggatgagcagcgtagtcgttacgcgcaaatcaagcaggcctgggataatcgacaaatggatgtggtcgaacaaatgatgcctggactgaaggattatccgctttatccctacctggaataccgccagatcaccgatgatctgatgaatcaaccggcggtgacggtcactaactttgttcgcgctaaccccacgcttcctcccgctcgcacgctgcaatctcgtttcgtcaatgaactggcgcggcgtgaagactggcgtggcttgttagcctttagcccggaaaagcccggaactaccgaagcgcaatgtaattactactatgcgaaatggaacaccgggcagagtgaagaagcctggcaaggggcgaaagagctgtggctaaccggcaagagccagcctaacgcctgtgacaagttatttagcgtctggcgtgcgagtggtaaacaagatccgctggcgtatttagagcgtatccgtctggcgatgaaagcgggtaacacaggcctggtaacagtgctggcagggcagatgcctgccgattaccagactatcgccagcgcaatcattagtctggcgaacaaccctaatacggtactgaccttcgcgcgtacaactggcgcgaccgattttacccgtcaaatggcggcggtggcgtttgccagtgtggcgcggcaggatgctgagaatgcacggctgatgatcccaagccttgcccaggcgcagcagcttaatgaagatcagattcaggagctgcgcgatatcgtcgcctggcgtttgatgggcaacgatgtcaccgacgagcaggcgaaatggcgcgatgacgccattatgcgcagccaatctactagccttattgaacgccgtgtacgaatggcgcttggcaccggcgatcgtcgcggcctgaatacctggctggcgcgtctgcctatggaagcgaaagagaaagatgaatggcgttactggcaggcggatttattgctggaacgcggacgtgaagctgaagcaaaagagattttgcatcaactcatgcaacagcgtggtttctacccgatggttgcagcacaacgcatcggcgaagagtatgagctgaagattgataaagcgccgcagaatgttgacagcgccctgactcaggggccggagatggcgcgcgtgcgcgagttgatgtactggaatctcgataataccgcgcgtagcgagtgggccaatctggtgaagagcaagagtaaaacagagcaggctcaactggcgcggtatgctttcaacaaccaatggtgggatcttagcgttcaggcaacgatcgccgggaagctgtgggatcatctggaagagcgattcccgctggcttacaacgatcttttcaaacgctacaccagcggtaaggagatcccgcaaagctatgcgatggcgattgctcgtcaggagagcgcctggaatccgaaagtgaaaagtccggtaggggccagcggcttgatgcagattatgcctggtacagcgacccatacggtgaagatgttctctattcccggttatagcagtcctgggcaattgctggatccggaaacgaatatcaacattggcaccagttacctgcaatatgtttatcagcagtttggcaataatcgtattttctccagtgcagcttataacgccggaccagggcgggtgcgaacctggcttggcaacagcgccgggcgtatcgacgcagtggcatttgtcgagagtattccattctccgagacgcgcggttatgtgaagaacgtgctggcttatgacgcttactaccgctatttcatgggggataaaccgacgttgatgagcgccacggaatggggacgtcgttactgatccgcacgtttatgatatgctatcgtactctttagcgagtacaaccgggggaggcattttgcttcccccgctaacaatggcgacatattatggcccaacaaagtccctatagtgcagcgatggcagaacagcgtcaccaggagtggttacgttttgtcgacctgcttaagaatgcctaccaaaacgatctccatttaccgttgttaaacctgatgctgacgccagatgagcgcgaagcgttggggactcgcgtgcgtattgtcgaagagctgttgcgcggcgaaatgagccagcgtgagttaaaaaatgaactcggcgcaggcatcgcgacgattacgcgtggatctaacagcctgaaagccgcgcccgtcgagctgcgccagtggctggaagaggtgttgctgaaaagcgattgattttgtaggcctgataagacgtggcgcatcaggcatcgtgcaccgaatgccggatgcggcgtgaacgccttatccgtcctacaaatacccgtaatttcaatatgtttggtaggcatgataagacgcggcagcgtcgcatcaggcgcttaatacacggcattatgaaacggactcagcgccaggatcaccgcctggtgatagacgctggcgcgagtgagtttcccggcggtaaacacgccgatcgccccttccttacgaccaatctcatcaataccggtataacggctcatcacgggaccaagcgcctcaccttcacgcactttttccagaatcaccgcaggcaacggcaaagtagcgctacgcgcctcgccgcgctggctggcgttttcaatcaccacccaactgaaagtgctgtcaccatcgatgccagcttcaatcgccacccaaaaatcagcctctggaagtaaacggcgggcattggctacccgatttcgtgcgccagcgcgcgtttcctcactgccaaagggctgttccggtacaccgctctcgacggcaacggatgcaatatggcaggatccttcgccgaagatctcgtgaaatgcctgcagaatggcctgaattttagcgggattggtggtcgcacagacaacttggtgcataatcagcattactcagaaaattaacgttacagcagtatacggaaaaaaagcatgttacaggtatacctagtccgccacggtgaaacgcagtggaacgccgagcgacgtattcagggccagtctgacagcccgctgaccgccaaaggtgagcaacaggcgatgcaggtggcaacccgtgccaaagagcttggcattacgcatatcatcagtagcgatttaggacgcacccggcgtacggcggaaatcatcgcccaggcctgcggctgtgacatcatctttgattctcgcctgcgtgaattaaacatgggtgtgctggaaaaaagacatatcgattctctgaccgaagaagaagagaactggcgtcggcagctggtcaatggcaccgttgacgggcgtattcctgaaggcgagagtatgcaggagctcagcgatcgcgtcaatgcggcactggaatcttgccgggacttaccgcagggaagccgaccgctgctggtgagtcatggtattgcactgggatgcctggtgagtacgattctcggattaccagcatgggcagagcgccgcttacgtctgcgtaactgttctattagccgcgtggattatcaggaaagcctgtggctggcgtctggctgggtcgttgaaaccgcaggggacatcagccatctggacgcccctgcattagatgagctgcagcgttaacgacggatcggaatcagcagttcacagcgtagattaattgggcgatctcccgctttggcatcttctgccgggtagtatcgctcaatatcctgacctttacggcgcgtcaggttgagcattggcatgcacgttccgtataccgtcaggataaactcctgcacgccggttcccagaccttcataggtaaacatcacatattcgccgccctgcagcatcaccggatgccccgtcagtacatagccatctgcctgatcctgggctaacgcggtggtatagaatacctcttgctcgtcgtctttatcctgactcggacgcgtttcattcaggccgtagagcaccggcggaatggtcggcgcgttgccgagaaaatcgtgccagaactgataacgcatttcatggcggaaatcagagatttgctccaggctacaggagtagctctgggtaacaccaatcagcggcgtatcttccagggtgacaaatttgtgctctggcatagtgaattcacccaggcgtagcggcgggcgaataccaaaggcgctccattcaggagaacggcggtaaagtgcaggagtctgggcaaactgcttcttgaatgcgcgggtaaatgtctgttgagagtcgaagcggtattgcagcgcgatgtccagaatcggacgcgcagtcaggcgtagtgcgaccgcgcttttgctcaaacgacgagcacgaatatacgcgccaatagcatggccagtgacatctttaaacattctctgtaagtgccacttggaataacctgctttcgccgctacattgtcgaggctcaggggctgatccagatgaccttccagccagattaaaaggtcgcgaataatgccggcctgatccataaaatatcctcatcctttcaacaacgagcacctgacatcaggtaattggataatagcattttttgctgttttagcattcagtgtttttttcttagtagagtatgttttagggcttgacggaaataaaagtattgagattttgttcttaatcaatatgttatttaccgtgacgaactaattgctcgtgtaatagataaaaatggtaacaatatgaaatacaagcatttgatcctgtctttaagcctgataatgctggggccattggctcatgcagaagagattggtagcgtcgacaccgtatttaaaatgatcggcccggatcacaaaattgttgtggaagcctttgatgatcccgatgtgaaaaatgtcacctgttatgtgagccgggcgaaaaccggtggtattaaagggggattgggtctggcggaagatacctccgatgcggccatttcttgtcagcaagtcgggccgattgaactgagcgatcgtattaaaaacggcaaagctcagggcgaggtagtattcaaaaaacgcacgtccctggtctttaagagcttacaggtcgtgcgcttttatgatgccaaacgcaacgcgctcgcttatctggcttactccgacaaagttgtagaaggtagcccgaaaaacgcgattagcgcggttcctgtcatgccgtggcggcaataacagaggcgatttatgcaacgggaaacggtctggttagtggaagatgagcaagggatagccgacacgctggtctacatgttgcagcaggaaggttttgccgtcgaggtctttgagcgaggcttgccggtgctggataaagctcgcaagcaggtacccgacgtcatgattctcgatgttggtctgccggatattagcggctttgaattgtgccgccagttactggcgctccatccggcgttacctgtactgttcctgacggcccgaagtgaagaggtcgatcgcctgcttgggctggaaattggtgctgacgactacgtggctaaaccgtttagtccccgcgaagtgtgcgccagggtgcgcaccttactgcgtcgggtgaagaagttcagcacgccgtctcccgtcatccgtattggacattttgaattgaatgaacccgcggcgcagatcagctggtttgacacgccattagcgctgactcggtatgagtttttattgttgaagacgttactcaagagtccgggccgcgtctggtcccgccagcaactgatggatagcgtatgggaagatgcgcaggacacctacgatcgcaccgtcgatacccacattaaaacgctgcgtgccaagctgcgcgccatcaaccccgatcttagtccgattaatactcatcgcggcatgggatatagcctgaggggcctgtaatgcgtatcggcatgcggttgttgctgggctattttttactggtggcggtggcagcctggttcgtactggccatttttgtcaaagaagttaaaccgggcgtgcgaagagcaacggaggggacgttgatcgacaccgcaacgttgctggcggagctggcgcgtcccgatttgctctctggggacccaacgcatgggcaactggcgcaggcgtttaatcagctacaacatcgcccgtttcgcgccaatatcggtggcattaacaaagtgcgcaatgaatatcatgtctatatgaccgatgcgcagggcaaagtattgttcgatagcgcaaataaagccgttggacaggattatagccgctggaatgacgtctggctaacgttgcgtggtcagtatggtgcgcgcagcacgttgcaaaatcctgccgatcccgaaagttctgtgatgtatgttgccgcaccgattatggacggcagccggcttattggcgttttgagcgtaggcaaaccgaacgcggcgatggctccggtcattaagcgtagcgagcggcgaattttatgggccagcgccattttgttggggattgcactggtgattggcgcaggcatggtttggtggatcaaccgctctattgcccggctcactcgctatgctgattccgtcactgacaataagcccgttcctctccccgatctcggtagtagcgagttgcgtaaactcgcgcaggcgctggaaagtatgcgcgtgaagctggaagggaaaaactatattgagcagtatgtttacgcattaactcatgagctaaaaagcccactggcggcgattcgtggagcggcggaaattttacgcgaaggtccgccgccggaagtggtggctcgttttactgacaacattctgacgcaaaatgcgcgtatgcaggcattggtagaaacgttactacgccaggcaagactggagaatcgtcaggaagtcgttctgactgctgttgatgtggcggcattattccgccgcgtcagcgaagcgcgcaccgtgcagttggcagaaaaaaaaatcactctgcatgttacgcccaccgaggttaacgttgctgctgaaccggcgttactggagcaggcgctgggaaatttactggataacgccatcgattttacccccgagagcggttgcatcacgctaagcgccgaagtggatcaggaacacgtcacgcttaaggtgctggataccggtagtggtattcctgactacgcgcttagtcgtatttttgaacgcttttactctttgcctcgtgcaaatgggcaaaaaagcagcggtctggggttggcgttcgtcagtgaggtcgcccgtttgtttaacggcgaagtcacgctgcgcaacgtgcaggaaggtggcgtgctggccagccttcgacttcaccgtcacttcacataacttcaaattcttcccacatagtcttcgtatcctgctgccattgcaaaggagaagactatgttgaaatcccccctgttctggaaaatgactagcctgtttggtgcagtattgctgttgttgattccgataatgctgattcggcaggtgattgtcgaacgtgctgattaccgtagcgatgtggaagatgcgattcgccaaagtaccagcgggccgcaaaaactcgttgggccgctcatcgctattcctgtgaccgagctttatacggtgcaggaagaggataaaaccgtggagcggaaacgaagttttatccatttttggttacctgagagtttgatggttgatggcaatcagaacgtggaagaacgcaagatagggatttataccggtcaggtctggcacagtgatttaacgttaaaagccgatttcgatgttagccgtcttagcgaactcaacgcgccaaatatcaccttaggcaagccatttattgtgattagcgtcggggatgcgcgtggtattggtgtggtgaaagcgcctgaagttaacggaacggcgctgaccattgaacccggcaccgggttagagcaaggcgggcagggcgtgcatatccctttacctgaaggggactggcggaagcagaacctgaagctgaatatggccctgaatttaagcggtaccggcgatctttctgtggtgcctggcgggcgtaatagcgaaatgaccttaaccagcaactggccgcatcccagttttttaggtgattttctaccagccaaacgggaagttagcgagagtggttttcaggcgcactggcaaagcagctggtttgctaataatctcggtgagcgttttgctagtggcaatgataccggctgggaaaacttcccggcgtttagcgtcgcagtaacgacgccagccgatcaataccaattaactgaccgggcgactaagtacgccattctgctgattgcactgacttttatggcgttctttgtttttgaaacgctcaccgcgcaacgtttacacccaatgcaatatttgctggtggggcttagtttggtgatgttttatttgctcttgctggcgctttctgaacataccggttttaccgtggcatggataatcgccagtctgattggggcgataatgaacggtatttatttgcaagcggtattgaaaggttggtgcaacagcatgttgtttaccctcgcgctgttgttgctggatggtgtgatgtggggactgctcaactctgccgatagcgcgctgttgttgggaaccagtgtgctggtggtggcgctggccggcatgatgtttgtgacccgtaatatcgactggtatgcgtttagtctgccgaaaatgaaagccagtaaagaagttacaacggacgatgagttacgtatctggaaataaggttgaaaaataaaaacggcgctaaaaagcgccgttttttttgacggtggtaaagccgattaatcttccagatcaccgcagaagcgataaccttcaccgtgaatggtggcgatgatttccggcgtatccggcgtagattcgaaatgtttacgaatacggcggatcgtcacgtctacagtacggtcgtgcggtttcagctcacggccggtcattttcttcagcagttcagcacgggactgaattttgcctgggttttcacagaagtgaagcatggcgcggaactcgctgcgcggcagcttgtactgctcgccatcagggccgatcaagctacggctgttgatgtccagttcccaaccattgaacttgtagctttcaacgctacgacgttcttcgctgacagtacccagattcatggtacgggacagtaggttgcgtgcacgaatcgtcagttcacgcgggttgaacggtttggtgatgtagtcatctgcaccgatttcgaggccgagaattttatcgacttcgttgtcacggccagtcaggaacatcaacgcaacattcgcctgctcgcgcagttcacgcgctaacagaagaccgttcttacccggcagattgatatccatgatcaccaggttgatgtcatattcagagaggatctgatgcatttccgcgccatctgtcgcttcgaaaacatcatagccttccgcttcgaaaatacttttcaacgtgttgcgtgttaccaactcgtcttcaacgataagaatgtgcggggtctgcatgtttgctacctaaattgccaactaaatcgaaacaggaagtacaaaagtccctgacctgcctgatgcatgctgcaaattaacatgatcggcgtaacatgactaaagtacgtaattgcgttcttgatgcactttccatcaacgtcaacaacatcattagcttggtcgtgggtactttccctcaggacccgacagtgagtaaaacggctgtcatcctaaccattttaacagcaacataacaggctaagaggggccggacacccaataaaactacgcttcgttgacatatatcaagttcaattgtagcacgttaacagtttgatgaaatcatcgtatctaaatgctagctttcgtcacattattttaataatccaactagttgcatcatacaactaataaacgtggtgaatccaattgtcgagatttattttttataaaattatcctaagtaaacagaaggatatgtagcattttttaacaactcaaccgttagtacagtcaggaaatagtttagccttttttaagctaagtaaagggctttttctgcgacttacgttaagaatttgtaaattcgcaccgcgtaataagttgacagtgatcacccggttcgcggttatttgatcaagaagagtggcaatatgcgtataacgattattctggtcgcacccgccagagcagaaaatattggggcagcggcgcgggcaatgaaaacgatggggtttagcgatctgcggattgtcgatagtcaggcacacctggagccagccacccgctgggtcgcacatggatctggtgatattattgataatattaaagttttcccgacattggctgaaagcttacacgatgtcgatttcactgtcgccaccactgcgcgcagtcgggcgaaatatcattactacgccacgccagttgaactggtgccgctgttagaggaaaaatctagttggatgagccatgccgcgctggtgtttggtcgcgaagattccgggttgactaacgaagagttagcgttggctgacgttcttactggtgtgccgatggtggcggattatcctagcctcaatctggggcaggcggtgatggtctattgctatcaattagcaacattaatacaacaaccggcgaaaagtgatgcaacggcagaccaacatcaactgcaagctttacgcgaacgagccatgacattgctgacgactctggcagtggcagatgacataaaactggtcgactggttacaacaacgcctggggcttttagagcaacgagacacggcaatgttgcaccgtttgctgcatgatattgaaaaaaatatcaccaaataaaaaacgccttagtaagtatttttc
